United States Patent Application Publication US 2025/0235397 A1 - sequence listing, part 14

SEQ ID NO: 15 - DNA, 3326540 bp, unidentified (residues 1,663,271-3,326,540 of 3,326,540)
  source 1..3326540: mol_type = genomic DNA; note = Lactiplantibacillus plantarum
tgtgccgttagtttcgcggagttcacggagattttggtaaatgccaccatggtcttctgcaattgccatgccattatcgttaaccagaataatgaggttagactttaaggtggccgcgatgtttagaccttccaatgctaaaccaccggataatgagccgtcaccaatcactgccatgacattgcctgttttgccctcaaggtcacgaacaacagccatgccagttgccaaggcaatcgaggttgaagtatgaccaatattgaaatagtcgtgggggctttcttctggggcagtgtagccgctgacatcattataatgagcggggtcaagccaagcttgctttcggcccgttagaatcttgtgtgtgtaggattggtgtgaaacatcccatacaaccttatcaactggtgaattaaaaatggtgtgaaaggcaatggttaattcgactacgcccaagttagggccaacgtgaccaccagtttgactaactttattgagtaggacgtgacgtaactcgcttgcgagttgtgttaattccggcaaggataattgtttcagatcggccggctgatcaatgcgtgctaaaatcggtgtttccattatctatcgctcactttctcattcatgaatacttttatagattagcaccttagagccactctaagacaagtgttttgtttcaagaatatcataaaaaatgacgccgacaagttgtcaggcgtcattaggttaccatggtcacaagattggggggcttgttgagacgttcagttggcagttcgaccaatggtacaacgttagtgtaacggacccgatgcccaaatagtggtgtggacagttggtcacgttattgacattactaaacgaatttagtcggtattgatcgattgcaagtaaactaactgatcagttgaaatttgttcatagagttggttaccaagttctgagctgaatgttttattggctaattgggtctgaatgaagttatattccaactggaatgcttcaattagaagctcattttgagtttcctggaaatcccgttcaccagataggcggcgatgacgttcatcataggcgcggcgaacgatcccgatagcttgctgattgtcagcagtaatcgtgtcggctaaataagctaacacggcctcatacggcttttgttcgatctgtcgcatttgttgccacatttgccgattacgagtcatgagctcagttcgactctgaccaccacggggccggtattgtcggaacattttacgtcgggcacgagcttttttgctgagcgaccatttgctgagtgtaaaccggaaaaataatttcaagcgttcgaagaaagtttgttgattctgcagacgcgtctgactagcgacgcgcatgtacttttcggcggcatggggcgtgatttcattgttggcaaccatttcatcaatagtggtttgttcaactttgaaagtggcgtcgaacaagctcgccagttgcgagcgcttaggacgaccatctagtactcgttggccggacagaatcgcaatcactttactagtgccagcattattaccatggcgtgcttgcatgagatcaatagcgtgagttaccatgtcagctttggcggttgccaattcatcttcagtgaccttaacaacttgttttggcaacgtcaacggtaacaaaagtgttggcaccagcagactagttagaatgaccactgcggcaacgaaaataatatcgttgcgataaggaaaagcactgccgttgagtgttagtggtaatgaaaaagccatcgccagcgtaatcgtgccgtgaacgccgctcagacccatcacgaatgcattacgggtcttttcatgattatcccacgcgcgaatacgggctaagtcgaagcgcgtccagagaaaacgggcgaacgtcatgattaggtagagcaagattcccagaccgactaataccgcgaccgaactagtatcacgttgctgtaagtggttgatgacacttggcaacgacacacctaataacacaaagacgataccgttcaaaatactagccacgattgaccaagtcgttgtcatcacgatttgtagccgggaagtggtcaaccgtaattgatcggactggacaccatgaatgagaccggtggcaacaacagccaagataccggaaacgcctaacgattcagctaagaaatagacgacaaacggtgtcagtaatgtgtaggggacgatcacagaaggtgtatcgacccgcatgcgaatcagcataatcctgacagcaacaatgacataaccgatgattaggccgacgaagattccaccggcaaagacatataaaaagttagtgattccgtgccagactgaaaacttaccagtgacgatcgcagcaatcgctaagttaaaggccacgattccggaggcgtcattgaacagtgattcattttcaagcgtcgtcatgactgctcttggaatcgcaactttagtcgtaatcgatgagaccgcgacggcatcggttggcgtaataatagcgccaagggcaaaagcaagtgccagcgaaaactcaggaatcagtaagtgagtgaccgtaccaacaattaggatggtcacgatggctaacactaccgaaagcgaaagggtcgtgccaaactggtgactgagcttgcgaatgttggtgttttggccatcattaaacattaaaatcgaaataatgacgaatagaaaaatttcaggttccaattcaaaatttcgatacaacggaatcagagacaagattaacccagccccaatttgtaaaaaggcgactggaatttgattgaaacgtgcgtagacggcgttagcaacgacgacagccgcaacgagtaataagactaagaaaacggtttgcaaaccaaatttcctcctagattttgtaaagtagtttaattttaacgcaatcatatgaataaaagtattatctgcaatgattaatttggggctggacctaatgtttaaaaaaagaccgattagaagttaattattgaacgttttgacctaaagtatgtcattagcttggcgtgacgttctaagtcagtataatgaaattatcaacttaactggaggacatcgcgatgttaacaattgcttatatcggcaacggtaagagtgctaaccgctatcacttaccatttgcactgaaactcaaagatcaaattaaggtgaagaccatctattcacgttcaggacaccagaattggcaaccaattgcgggcgtgcattacacgactacgttagcagatatttatgaggaccctgatattcagctcgtagttgtttcaacacctagtcatacgcactattcggtagctaaggatgtcttgaaccatggtaagaatgtcttggtggaaaaaccatttacggaaacatcagcggaagcccgcgaactttttgaattggctaagcaaaagcatttgtttattcagtgttaccagaatcggcgctttgattcggactatttgacgacacaaaaggtcattgaaagcggcgtcctcggtgacttgctggaagtcgaaatgcactttgattatttccggccagaggttccaaccaatgttgaccatttttcattagatacgagttatttatatggtcatgcttgccatactttagaccaagtgattgcatacttcggggagccggatgacgtgcactatgatgttcggcaactattgggaagtgaccggatgaatgattattttgatatcgatctgtattacggtgccttgaaagtctctgtaaaatctagctatttccgcattaaatcacggccgagcttcgtggtttatggcaaaaagggcatgttcgtaaaggcgactaaggatcgtcaggaatacgatctgaaacatttttacatgccgaatcacgctgactttggcattgatcaacctgaaaactatggcacgttaacttatatcgacgatgcgggtcagtatcacgaagaggcagtcgtttcggaagttggtgactacagtcgggtttacgccggcgtttacgacagcatcatcaatggacaacctaagttagtcaaagatgaggaaacgttgttgcaagtgaaaatgttagaaactggtattcaacaatgccgacattagcgcttcttgagtgttgcactagcccagctattggtacgtgtcagctttagattgttgttcggctaccggtgtgcgtcctaggaggttggtgccaattgttggcggtcggcgcaagccgacgctggctaagcatgtttacgcaaacttgagcttttttcagtgggccttagctgatttcatttggccggtattaattcgttaatataaattatgaggaggattatgatgcgattaggaattttaggaacaggcaagattgttcaggacttcttgccaatggtgaagagcattcccgcgattgaattggtgggattgctgtcaacgccgcggagtgtggcgcgagcacgcgagctgcaagccacgtatcgtattggaacggtctacacagattatgcagctttgctagccgatacgacaattgatacagtgtacgtcgctttgccgaattcgttacattatgactatgcgaagcggggaagaacgtcatttgtgagaagccgtttacgttagtggcatctcagttaacggaactaatcgaattggcaggtcgccaagacttagtgttaatcgaagcaattacgaatcagtatttggaaaactatcaggcaatcaaacgtgatttgaccaagttgggcgacttgaaaattatcgaatgcaactattcgcagtattcatcacgttatgatcagtttaaagccggaacgatcttaccagcttttaatcctaagcttggtgggggcgccctgatggacttgaatatttataatattcattttgtggttggcttgttaggcgcaccaacgcacgtgcagtatttagctaatgttgaacgaaatattgatacatcaggcatcttagtgttgacctatccgaatgttaaagtcgtttgtatcggtgccaaggattcgacttcaccggtacgttccacgattcaggggacgactggttcgatcattgtcaacggtcctactaatacggtcgaaagtatcactgaaattgcacatgatggaacgacaactgatttagcgcttaatcaagctgagcatcggatgtatgctgagtttgtggcgtttgaacgtcttattgctaatcacgatatggtaaccgttaagcggcaattagatcattcccaagcggtcatggaagttgttgaccaagcgttagcgagcgcgggattgcaattgggctaatgcgtcgttgctaatgtggctgcacaataaatagaagagattgtaaaaagcgtgtcctagaaactgtaggacgcgcttttgagccgttagatgtgttattttgtggtgagcgggccgtcctggattaggtgctgtttttgtcgcaggtcttgtaaatggtgatgaaaatcatgtgcatacatgactgcgaaaagactgtctaagacgtattcaaacgccgcttgggatgcaaaagtaccgattttggcaaaattatattcactctgaacggtgagcaagtgctgggtcgcttgactgatgagtggtgattgtggattacctgttaggacaatcatgggaatttgatgagcgtgaaaataggtggcaacttgctgatggattttagtagtaccagcatatgaaataatcagagcacaatcatcagctgttaagttggctgcgttccaggattcgtcagcatattcttcggcgattatagcaaaacgattgattttgacgagtttattttgaaaactacgggcccgtagttgtgagtcaccttgcgagaagataaagattcgttttgatcgcgtcaataagtcagcagcttgggctaattggttcgtatcaagttgctgctgggctgtctgaatggcccgaatattcaaggcggccatcttttggctgattgtggcgaccgaatctgtcgccgagaacggaaaattggcatccacagtggcggcttgatgtgcctgggcaatgctttcggcagtcaatttccgttggaaatcgcgaaagccccggtagttcaatttttgggccaacctaatgattgctgaatgggatgtgtacgtcttagcggctaggtctttgatcagaatagttggcatttgatctagatgtgccagaatatagctactgatccgctgttcagtactagtaaagtctgactgttgttgcaaggcaattaatattgacatgtcatcgacctccatagttagtatcatacggttaatattggaaaaaagcgacgattatcataaaactgagtaaaatcagcttgacctggtaccggtttcataaattatggtaattatatgaaacaacgtggtatcatcaattgagagaggaagttctgtgatgacgaatatacatgatattgcgcgactatcgggttattccgtctcgacagtctcgcgggtaattaaccatcagaagtacgttgcggatgataaacgggccaaagttgaggctattatgcaagaactggattacgtacctaaccgggtcgctcgtgatttaagtcgggggcggacgaagacaattggcgtggtactaccgtatgcgaatcacccgtatttcgcacgggtagttgatggtatcgtcagtgcaggctttgcggcgggttataaaatcatgttgctgccgactaattatgatatgacgattgaacgccattatttagaagacttaagaagtaaagcctatgatgcgctgatttttacgtcacgtagtagttcactggatacactggaacgttaccgcaagtatggtcaaatcgtctgttgtgaagatccaggtgatgaccgggcattggccgcagcttatacggaccgcatggcttcatatgttacggcattacggtgggcgaagcaacaaggttatgcgacgatgggcgttattttgagccgtaataacgtcattagtgctagtacacgggttacgcggcgagcctaccacgaagtatatggtcagttggatgacgagcgactctataccggtgctgccacttatgaagacggttaccacgctggtaagtattttgccaatcaagcgtctcgcgtggccgcgatttttgcaaatggcgatgatattggggcgggcgcctatcaatattttatggatcacgggttagcccccattccagtgattgggcaggagaacttgctgacgagtcgactattaaagttttcgacgatcgaccatcatctagaatcattgggtcagtcagcatttcgattggcaatcggcaagacccgtacccatgaattgattaaatcagaatttatcccgcgataacttggaggagcaattaatatggtagcaagattagcagtttttgacattgatgacacactattggctcgcaataagcaattattaccgagcaccattgaaagtattcaagcacttagagatgacgggattcatgtagccatcgccacgggtcgcaatttagcgatggcccggccagttattaatgccttacaattacaagattatgtactgtgcaatggttcagcagcgtttgctggtcgccaacaaattcatcaacacaccttatctaaagacaatgttggcaaattggttgcggcggcggataaacagaatattgatattgtggtcgaatcactggatgggctacatatccacacacatccgtccaccacgacgcgccaggtgttgaacacgtttcgggcacctgagttggattatgcccctgattactatcagcaccatgatgtgtatcaggccatgatgttttacccggatgtccaaaatcgattgttgccgcatccagatgagttttcctttgttcgttttcatgaacgcggggttgatatcattcccaaagtgggatctaaggcgcaaggaattgcaaaactggcagcggcacttaatgtcgattcgagtaacgttgcggcctttggtgataatgataatgaccgagagatgattcagagcgccggtattggggtcgctatgggtaacgcgaaagctgagattaaagcattagcagacattacgacgaccgattgtgatcacgatggcatcgccaatggactaaaaaaaattggttggctataaattttaatgaaataaaactgtgatccaaacagttgacttgcggaattcggttccagcaatcagtatgttggggtcacagtttttgattagttatcgcgtagcatcttcttgatcgccgctactgaacgggcgacttgttcgggatcaactggctttttttcagctggtgtcgagcgtacagtggccgattgattagacttagttggtgttgggttcgacatagtcggctgtggcacactagttttagctggctgtggactaattttagcaccagtcgaggcttgagccggctgaccagcgtgcatttgatccatagtttgattcaacaaatgatcgacaaagacattgccctgattggtagcgtggcccttagtccagcggtaattaagtgcagtgaatgctggaagcaaccggtcgacttcacgccataactcagcgttaactaacggaccattgctgcgtttccagccgcgtcgtttccaaccagccagccagcccttagtgactgcgttgaggacatactgtgaatcaagtacgaacagaatcccagtcttagtttggccaagctgttgcaattgttcaagagctcgtaagaaggccatgatttccatgcgattattggtggcaccccattcgccggcagagtcagtgacgagttggtcgggcatttcaatccgataagcccaggcagccttatcatcttggtgcacgtgctgaccggcaacgtttccggtatttcgcgaaccgccatcagtataaacagtaatggctgcgttgaccggcgtttgattagatattgattttgagtgagctagtcgggttggactggccttaccagccataaaatcctgagcgtctttctcgcttgtgaagctcttgtactgtgcttgtggataaccgctaacttgcttttgagtttcgggccaggtgcggtaaataccaggttggcgtcccttacgaacagcgtaatatttttgtgccatggcgatacctactttctgaatggtgatactgctaatttaacataaattgccggggaaaaatgaaaaattagcagacttgtaaataaataataacaaccggatcacggaagcgaacttctgtgatccggttgccatgatgaaatataactaatgggctttaaataatgtcgtcaggtaattcatgaatgtcttcaaataacgatccttgtcgaccgttaacgcaaccgtgacgttagttgggtcattgagtcgcgcagggtcaccaattgtccggccataatcttcaccactagcctggacgtacatattcaggtctaacgtggtgacaaaacttggatcgagtgaaacgccgactgccagtggatcgtgtaaggcacaaccgtgtaagtcaggactcgtaatatcgtaagccgcaatgtaatagtcaacaatgtcagcaaatttttcgcccgcagttgtctttaagtcccgccattgttgtgtttcagtcttggttaataatgtccgtaacgttacgtcgagtccgaccatcgtaagaggcatcgtactggtgaagacggcgttggccgcttcggcatcttgattaatattggcttcagcgtagtgactgacattacctggaacagtcagtgcaccacccattaaggtcacattaccaatggtgctggcaatgtctggtgctttttcgagtgcttcggccaagttggttaagggaccggttggcactagggtcagatcggcgccatattggtgaacggcatcaattaaaaagtcgacaccggactgcttttccacggcgcgtttcggttcaggaaggttcacgtcgccgataccgttcatgccatgaatctgctgtgaaatcggcataacgtcaaagtgttccgtcgtactggagtggggttcacctagaaagacgggtacgtcagtggcacctagtagttctagaatttgtaaactgttaatcgccgcctgatccactaggcagttcccataagaactgataatcccaattaaatcaacgtcgggtgcaccgactgcgtaggcaatggccattgcgtcgtcaatcccggtgtctaagtctaaaatcattttacgttttgccatgtaaaacatcctccctgattaggtctgaagcgctataaagctatgttttaattgtaaacgtttcagttgatgctgacaacggctagcggcgaattaaattaacattgaacagaaaaatgttcggaaatatttcacgaccacgcttactggcgaaatgttgaaggctgttttatactgacaattaaggaaggtgaagctgatgacgacgaatagtccattagaagcaatcatgaatgcgcgccattcggttcggcaatatgacggccaaactaaaattgggcgtgaagaaatggccgcgatgttacagaccgcatttttggcaccaaccgcattgaatcaacaaccgattcgggcgttggtgattgaggatgcagccttgcgacaacggttgtgtgccgcgactggtaataccagtcagttaactacggccagtgccgtcgtcttatttgtgctggatcgtgaaaaccaacaccaagcgccagcgtttcagaccagtcaggggcaacaatttgatactggtgacgagaccattggcgccctagatgctggcctgattgcgatgcaatttatgttagtggctaaagatcatggctttgatacgaatccgatgaccgggtttgatgctgccggattcacgtctattttggaacttgacgcccagcggtatcggccactattgctcgtttcaattggcaaagcggccgttgctggcaagccagcagatcatcaaccgctagcgacattagttgattatcgataatattgaggggaagctagaacgtgaattttgaaaagcactaccgatatactggaaagcaaaaattaggattaactaaattagcaacggcggttgatccagaatttgaagacgaaaaggtcatcaaggcacaaatcgccaagaatattaagcaactgactgaactgcaaggtaagttatatgcacaagaccgatttggtgttttagtcatttttcaggcgatggatgcggcgggtaaggacagtatgattcgccatatcatgagtggggtcaacccccaaggctgtgaagtcacatcgttcaagcaaccaactactaaagaaattgcgcatgattatttatggcgaattcatgatcgggtccccaaacgcggcatgattgggatcttcaatcggtcgtattatgaagacgtacttgttagtcgagtccatccggaaattattgtgaatgagcacgtcggtgagattaacgataagaaacaagtggatgatgctttttttgaacgtcgttttaacgatcttcggtactttgaagattacttgcaacacaacggctacttagtgctcaagttcttcttacacatgtcaaaggcggaacagaagcaacgttttattcgccgtattgaaattccaagtcacaactggaaattctcagctgccgatattcaggaacggcagtattgggatgattatcagcgtgcttatgatgatgctatcaccaagacggctactaaagcgacaccgtggtacgtcattccgtcggatagtaagtggtattcgcggctctgtgtttcggaaatcatcaatcaacgcctgtcggaattgccattagcgtatccctcactggatgcgagtgcgcaagcacaattaaaaacggcgctggagcaactagatcgtgagaccgactaacaaagtatcgcgcagtgttactagcagcaagttgaaattataaaaaatgagctactcacaccgttgatcgtcagttcaacgcgacgtgagcagctcatttttttgacggtgtgacaagctaattatgaatgccgatgcttagttcggcgtgtcaggacaaaagcgctaccgagtaatccaatcaataaggcgagaccgatagctactgaccaacttgccgagtgttcgttagtttgtggcaacgacttattcatcggtgctgagcctgcaaaagctgtagctgccgatgctggtaagggattagttgccggaaccgttgtggcggtcgtgttagtcgaatttgtcgctggattggcaggtgctgacagattaccactgacgcttggttcgggggtcgatggagacgactcatttggaacggctggagtgacggccgttggtttttcaggtgttacggttcctggattggtgggcttaggaccactcggctgttctggtgagacggtacccggcttttctggttcagtgaccccgggtttctccggttcagtagtcccaggtttttctggttcagtgaccccgggtttctccggttcagtagtcccaggtttttctggttcggtgactccgggtttctcaggttcggtagtcccaggtttctctggttcggtgactccgggtttctcgggttcggtagtcccaggtttttctggttcggtgactccgggtttctctggttcagtagtcccaggtttttctggttcggtgactccgggtttctcgggttcggtagtcccaggtttctctggttcggtgactccgggtttctcgggttcggtagtcccaggtttttccggttcagtaactcctggttcctcatcttcatcgggatctattggttccgaaatacctggattttcgggaacgtccggttcggtgactggccgtgaaatcgtggctgtcgcggatcccttgttgccgttcttgtcagtataggtgacattattttcaaaagttgcgtcgccagtgggttcgttagtcttagtttggtaggtcaaagctaactctgacgtaaacgaccctgtggcattaaacgtcaattgattaccattcacgctcgtattgacgggaataatattacctgtctcatcgcgtaggacggcgctgccattgacatacgtttggttcggactcaacgtatcaacaaaggtgggatcgacgagctgattgttattaggcaagacacgaattgtccagttgatccgccgtggattagcttcgtcagcccattcagctgatttctctaataaaattggggctaagttaccaggatgactaggaacggttccgaaggcgtccaattgaacaaaccctttccgattacgtggtctggtttgataggcctgattaaatgtgacgagacccgtatgtgcgccggcagcaatgaagaaggttccgatggtacctgcagtggttcctttcattggaaaagcctcgtcatgcggaatacgaacgttttcggggacttggaaagccatcgtgtcgcccaccttgatcttgaggttatcagggatgcgccagttgtaattgactgtgtattcttggtcttctggcaattgtgcatcgtgagccattatcttgcccttactatctttgataaccgcactattaacatcgttgcccgttgcttcaattacgttgcgggcctgactaactaagggtggcccgaacatcaaaaagaaaattccagtgagtgctaataataaccatcgccattttttgcgcatggtaatcgcctccattaagatatacccatatattaccaccattgtacatggaaatcgctgacaaaacaccgtttgctagcttaactaacggtatgcggccagatttagcagacttttttgtgattgcgttattaactgatatgtgatgttttaggataccagaaaagacaccatttgccatcccatccaagggacgtaagggtgtccgaatcttgttaaattagaagtgtggcgtgcttcaggttgattggcagcacgcctcgatgaattgatcagttgccgtacaagaactggatgatgagtaagtcgacctgtggattgatatgcaacattgagtggctggcggtcaggggactaccgtgaatgatttgggtttttggtgaccaaccagctgccaataattgatggctgaatttaagtacggcttgtaaattgacgccgccatcaccacttgtatgccaaacatggccggcaatattcaatatcggcaaggaccgtggtaaccggtttaactgctgagtggtcaagcccggataggtcgagccaatggtcacaaacttattgatttgtgcgcgctgggggacttgcgctgtcagataatcaaagatgatattacctccagatgagtgaccgacagcattgtagcgggtcacgtggtagcgttttgcgagcccttgcatgacagtagcaaactgccgagcttgacgtttcgcatgatgattatcggcaaagataacctgaatcgttgggttgttttttagtggtccgaactgttggacagtcacgtggccggcgtgactaacatggacgaccaatcctttcgtcatcaggtgtgccgcggttaagcggtgcacaaagccgtcggtagaaaatgcgcgcgcgtaatcgccaccgacgaagatggtcggaatactcgtttgggcgacccgcgtttttcgtaatggggtcaagcgatgttgccaataggatccaatccctacgaccagggtcgcactaataatggccatgattttaataattttaattcgtcgcatcactgatccacctcgcctttgaatcctattatagtcgaattagtaaaaattgcttttgcaaaccttcgccgaatccactagaatgagaagcaataagtctacatagaagagagctgggaaacgatgagtgcagaatatgatttaacaattattggtggtggcccggtcggcatgtttgcagccttctatgctggtatgcgtaatgcacgggttcagttattagaaagtctccccgaattaggggggcaggttcaggctttgtatcctgagaagatcattcatgacgttgcgggatatccggcaatcaagggccgcgaactggtggcacaacttgaaaagcaactcacacaatttccaattgacattcaattggcgagcccggtgacggatgtcacgggagcgatgggtgatttcacgattaccacggcgagtggacagcagtcacattccaaagcgattatcgtagcgactgggagtggggcttttgaaccccggcgcttagcagtcgataatgcggctgaatttgagaataagcaattattctaccacattccaagtgtcaagcaatttgcggatcgaacggtactagttgcgggtggtggcgactcagccatcgatatggccttgatgcttgaacccgttgctaagcacgtttatatcatgcatcggcgtgatcggttccgtgggatggaacacaatgtggacttgttaaaagcgtcttccgttgaaatcaagacgccatttttgattaagcaacttgcagagacggctaccggacagttacagctgacgatgaaagaggttcgcggcacaactgaagaaacattggccgttgatgatttgattgttaactatggctttatcgcggataataaagtcatccgaaactggcacgtgaccccaaccatggcccaccgactcatcaccgttgatacggagatgaataccgacgtacctgggattgcggctattggtgatacggtgacttacgcgggcaagttaggcttgattgccagtggcttcggggaagctcctaacgcggtcaatcagttaatgatgaccttgtatcccgaacgacggagtccactgcatagtacgaccgtgtttgaaaaaatgtaagtttaaaagagctgcgatataactggcgctatacaagcaaataggacgagaaaccgaatcttggtttctcgtcctatttgcttgttcctttaagaacccgctttattggcggcctgttgtaccatgaagtggtagaaaggcaaatgtttttttcaatctagatagctttggtgtgtcttaaaataaaaaaacaaccggtcgctccgactaaacttttacaatgtataagtttgtacaaaaaaatacacaaaatttactgaaaattgataacgataaagaaacgctgttgttaagataaattcgtaacatactgcctgttgttaacgtagaatttgagaggatgattctgtttatggcaaaaggttccattattgatggtgtgttagtttagatgattagattttatatgtcactaagtgttgtgaagcatacgatactttatttgtgttttatttttctattactgtatttaaaaaagcgttatccagacaatgtaattatcggttttttttaaaatacggtggtgttttattaatagtatgcttcatttacattttatcgcaatttggattgccggttaccgcaatcgatgttccaatagttcttggaattttaggtatttcggttgttgtgttgagacacaagcaaaagtaggacgaactgctaccaatctgttgcttacggagtcatgataactcatggctctttctggtttttatctaatattgacgtccctgataacgtactgtcatcaaaggacttcatggttcagaccctgtttctgggtcattccatatgagcacctaattggcggtaaaagtattaaaaatcagtggctgatcaactatcggcattcgtgcgctttagaaattaaaatggcagataacccggagcgctgagcactttaatacagttttttaccaacatctcaatcaccgcgacggctaatcagatcaaaaaaagcgctatccaaatgcacttatgcattcagatggcgcttacgattcgtcatcagctggaagtcactttttcagcaacgacatcattcagaattttcgtggttgctgaatgatttatgcactcgctgtgacagcaactttgaaataatgtggattactcgttgctagttagacttaattcattcataaaagtcaataagagtttggcatagctgggatggtcggtgttgctcttaacttcttgctgcatttccgttagattatcagtgactacgccggtgacgcccatgaacatcatttgatccatttggtccgtattatcaatgtcccaggcgtaaaccgtcttgtgattgcggtcagccttgtcaacgaattggtcgtttaatgtggtgacctccatggtgtagccgttcgcgactgtatgcgggaacgtgagattataaggcaagatgtaactaacgaattgtttttgatctaagcgtttcaagtcacgcatgactttgaaactaagcgtatggacttggtcatgatgagccagtagggtcgcaccataacgatcgatgaaccgtttagtatcggcggcggtgtaagccgagctggtcttgatttcgactaatagtttttgatgatgcttgtgagccgctttcaggtaagcatcgaaacttggaatctttgcctgatagccattttcacgaacagtaattttttctagttgttttaatgttaattgagatggctttttcttaacgccagctaaggcttttaaggttggatcatgcatgacaacgaattgatggtccttggtgacttggatgtccatctcaacgtaatccggatgttccttgctggtcttgatcagtgcaggaattgtgttttgcacgccgttaccgttatcgacgccgcggtgggaaatcatgattggcttggtaattactagtccatttaagtagactaaattaacggcaactagcaaacttgtcgctaacagcaagccaattgcaacactcgcccgagtcaatttgcgcaaccgtggtgcctcgttaaagtattgcggttgttggcggaggagtgtaaagtcttgacgatagcaaacaataattaacatcatgaagatggccgtggtataacaaataataatttcggtgattgcttccatgataaagagattaacagtggcagcggccatggcaaaacttgttttatcgaattgaagctgggctacgtaaatcaacgtataaatggtcgtggcgatcagaaaaatcataaataaggtcacaatcatggtccataagtagcgccaaagatggtggcgcgtttgttgccaactacgagtaacggccgttttccatggaagccgatcgacaatcattagcggtaataggctaattaggcgaattccaaggtaaccagccagcaagtagaagcaccccaagccgagcgtcatccacgggttttccatgagatagctgacaatgaaggctggaattttggccttgttgagtaatggtgttgtaaagatgaaacttccaaatggcaaaatcacaataaagtagccgataaagaataagaaagtgctgggtgaggtgccagtcagactagtgaccgttgaccgcaagaccgcgcgtacagtttgtggtcggccacgaaagatattcataatacccagtagcagaaacgcaaattgccaataaactaaaataataatggctaataagatcgccaccataccgagtgcggccagtggttggtgaataataatactaccgatattcgtgtacgagacataactgacccgttgccacttgagtaacatttctagcacccaattaaaaaaaggaattgctaggtaactaatgaccaaattggtactaaatatcagggcaacgtaactgccccagttcttataaaaacggcgggtactatcccaccaaaaacgccaagcgcccatgcgtggtgcctcctcccttgatccggcattgacgaatcaagtcattattaattttattgtaacacgcattgtgttagttatttttatctaaataattgcttagattagtcactctaggaaaccactttcaactaagcataatggggctaccgagcacgtttcggtaatccgtgcgaatggctgatgaacggccactgaacttaagagatggcacgtgtaatcatcgttaatgcgcaagcatgagacaagccgtaatcagtattttatcatgaaaacgatgccagatgggtgagggcagcgtcatatttaaaggagatcataaaaaggcgcgatggcaaataaattgccgtcgcgccttgcattgtaaatggaatgcttgttgctatttggaactgctagagctagtcgtggtactatccgtatcatcagggttggtaatcttgatacgagtagaatcagtcttcttatgcgaagcttccggtgcgtcggtcgtatacaacgagtccgttgacttattaccattcttcgagtagagactggttgacttgccagctaatttattttgaatctgaatttctttttcaaggccatcggcgtaattgtaattagaagcgtcgactttcttgaagcccttaggggtgtagaaacgtaacaaatttttattgttaagtgaatcagagaggcttaattctttgtcgactttcttctgatctttatcaacagtcttctgaactgcctcatcatcatcaatcgtttcgccagttgcgttgtcataaattttgccgctaaggacggtgtatttagacgtgacgaaatcgcgatttctaaacgcaacggtactatcgtgttgtttagagaagaggtcggtcccaaactgaatataacgtttgcttgaaatccctagtaagtgcagaatcgttggtaggacgtcaatttcaccgccataagtcgattcgactttaccactcttgattcctggaatattgatcatgaatggcacacgttgaagctgggcgctatcaaaggaagtccaatcgtccgcagatttaccgagaataggtgccaaggtcgagttttcactgttggataagccgtagtggtcaccatagagtacgatcatcgaattctttaataaaccagccttttgcaagtaggtatagaattctttgacggattgatcgaggtagtgggcggtctggaagtaaccgttaatggcggaatcactagtatccgttgtcttaaacgtcgtgtcttccttatcaagtgtgaatgggaagtggttcgttaccgtgatgtatttgacgtagaacggttgttgtagccgttcaagatactgaactgaattcttaaataacagcttatcctttagaccatatccagttgatttatcaccagtcgtatcgaaataactggcatcaaagaaatattggtaccccatattcttatacgtgttatttcgattccagaaactggccacgttaccgtggaagacggcggaggaataattggcccgttggtttagaatcgcgggagcggcctggaacgtattatctgagcctaattgggagaacaatgatccagttgagagcccgtaagtactagtttcaagcatattttcggcatcagaagttttcccttgaccaacttggtggaaaaagttcttaaaactgtaagttgagttgctatgatacagtttatttaagaacggcgtaacttccttaccgttgactttctgatcaataagaaattgttgaaaactttctagatgaatcacaatgacgttgcgacccttcgccagaccgtacatcttagcgtttggcgcggcatagtgtgattcagtataatctttaacggtatctaattctgatttctttgcgctggcgcgttgatgattggtctgttcatccttgataccatcatagactgtaaaagcatctataccaagatatttgacgatataagtgcggtcaaacgttctggttagtagttgtggtcggttggattctgctaaggtcaagttaagaccgaaacctgcaatcgcggcagaggtgtacgcaaaggccgtgtgtttcttaattggtcgtgtgtcttgcttaatccgatgaagaatgaccaaggccagaatgacaataatatccgcccagtaaagaacatcgccccaactcgctagggctaacgatgagccggtaagtccctgactgaccttggacacgccggtaatcgtactaacagtcatgaaatccgtgaattcacgatggtagataacgttggcatacagtaaaatggtgtcgagtgcatcaatgaatagcaaaatatagtaatatacaccggttttacgaatgtagaacgccagactaaacagaaagaccgtcgttgcaatcgggttcacgagcatcaggaatgcctggagtggatcggcaacgcctagtgaaaattcggttaagtacgcatagatcgttttggcccagaataagaagactagtagccaaaaaaatccaattcgcgtgttaacgtattggcgaaatttggtaaacatcgataaagacctcatttttaacaaatttggatatgactcgataaccagtcatcaaatcattttaacataatatcggaactcgtaatcgctaacaattttaagaatgcgttaatttcgtttcgagttagtttgacgataaccggtgaaacgcgtattctcaaagtatttcagaagaacgggtgataacgtgatgcagataaaaatgagtaaccaggttgattcatcagtttatgcggatgccattgcaatccggcgggcagtctttgtgcaggaacaacatatcgatgaaactttggaaattgatacggtcactccagcgacgtggcactacgtcttgtatgatgatcaaaagcaggcggtagccacagcgcgagtgacacctagcgaccaatggacggggcatgttcaacgagttgctacgttgaaagcggcgcgagggcagggctatgcacgacaattgcttcaacggattgcagcggatgggctgagccgtggttggcgacagttggtactaggcgctcaagtcactgcacaagggttttatacacaattagggtatcagccacaagggcgcccgtttatggaggcgggtttgcgacatcagacgatgatattgacattgtcgtaagcatattggcttaactttcagttggttaggttgttgattcgagtcatattccagaataaaggggccttcagcttaaggcttagctttgtggttattttttagcgagacaatgtaaatggaatttccggtagacttctaggcatagttctaggggccttttttgctaaacgattagttcggatagttcgcaaataaaagttttgattcgtagtaaactagttggttgcagtattgtacatatggagctgattagcgtgaatcactaactggtggccgaccctgacaatcatacgcgactgtgagggtgtgttgggttgtgagaatgacaaagacaaagctttttttgaatgggggaggagcgtatgcgaagaaagctagttgggtatatgctaagcatgttaacggtaatattagcgctatttatgctggggagtactgcacatgctaaagaaatcagtgttacgggtttaacggctggcaatgccatcgtacttgatgcgaatggcaagcccgttactgacacaagtacgttgaatgataaggctggctaccaattaacgtatcattggagtattccagattctgaagtgattaaggccggtgatacagcaaccgttgagattccaacgtacgtcagtatcgatcatgatgttgtgatgccgttaacagattctgccgggcaaaccttgggcacgtttacgtatacgaaaggtgccagtactgggacaatcacgtttacggatgcgttgggtacactcaatagtcgggctggcacattgagcatgaatgcgaagggcaatgcgacggcgacggaaggatcagccgaaattgctaaaagtggcttggttgtttcgtcgggaagtgatggtgcgccaacggtattggggtggcacattaccgtgacaccgggcaataactcgacggttgtggttacagatacgctagggcccaatcagacattcattccagattcggttgcggcacaggccgtgcaaattatcaatggtatccaagtgccacagcaaccgttaacaccgactgttgcaactaatggtaacgtgattacttttacgtttaacaacattcattcgccgtttgtgattacttataacactaaggttgagaattttaatccggctgacacagctaaatggcataatacggctgcactggacggactaggcgttgatgcgacggccgatattacctatggtggcaatggaacagcagggatgacctataccatcgaattaacgaagcatgatgcggcaaccaaggccgtgttggctggagccgtttatgaattgcaagatagtacgggcaaggtaatccaaactgggttgacgactgattcgcagggacaattgattgtcaaaaatctacgtgctggtgattatcagttcgttgaaaccaaggctccgtttgggtatgaacttaataccaccccagtaaaatttactctcggcggtattaagccagaggttgcttttcaggtaagtcaggatgatgtcaagcaaccagttgtgccgacaactggtgatgtcacgttaaccaagactgatgccacgaccaaggcggcattggctggggccgtttatgaattgcaagatgccactggcaaagtgctcaagatgggattaacgacggataccactggtcaacttaccgtatctggtctgaccgcgggcaattatcaatttgttgaaactaaagcgcctagtggttatcagcttaatgcggcaccgttatcatttacaatcaagccgaatcaaacggcagtggtaacggtagcagcaactgatgaaccggtcactgaaccaggaacaactgaaccaggcaaaccaggtgaaccagggacgactgaaccaagccaaccaggtgaaccagggacgactgaaccaagtaaaccaggtgaaccaggaacaactgagccaagtaaaccgggtgaaccaggaacgactgaaccaagccaaccgggtgagccagggacgactgagccaagtaaaccgggtgaaccaggaacaactgaaccaagccaaccaggcaaaccaggcgaaccaggaacgactgagccaggtaaccctggaaccacggggccaaccgcgccacaaccggaacgaccagctgtacccggtccaagccaacccgctgcacctaaaccgggacaatctggattaggtcaaccggcattaccaggactgatcaagcaaccaagcacgggtgtcaatggtgctggtggcactgtgggtaatggtgtgacaactggtatgaacggctttggaacgccaactggtagtgaccaaagcacatcagctggctataaccacggaactttgccgcaaaccagcgagaagcagtcgccgatttgggtgatttttgccgggcttttgggcttgttaattgccgcggtgggaatcggttatcgccgtcgtgcttgaagacgcatgaattgatttattaaagtatcatgtagggattgatgatgccccagaaattttatggcttctggggcattgttttggttatgtgtagagctaacattgtttacgggggcagttcagaatttcaatcaataaatttgaatcatcgtgtgagttacgattaagcaatatggtctagctagctgatgtggagattgttagccgtgtggtggcacacgcaaaatctttggcacagtgaatggcggatggcgatgaccttattagtctttgtcgttgctagtatgacgatattgagttagtcagcggtgactatcagattaccggtgctcacacaatcattaagtataaacgactggcagtttgctacgattcaatttagtattgtaaaaaagttgcgtttccagatttgacgtctggaaacgcaactttttttactcaaagattaggctaactaattgctagcggttggtagatgatgggcgaaagtgctgccaaagcgtggctatagctggtggctcattagcccaacgtgtccaccctgaaaatcccaatggaacgatgaggttacttatcgtaatcccaatgagactcatgagtgcaagcccctttaaggttggtgcggtcgtcaaaagcagtggcagtaagtaggtcaattcaatcattgttaccgggcaaacgaatcgtccactagtataaaagtgctgttgcagatgagcgggatccaagtgccgtaaccaactttgacggtaaccggttgcggtggtaatcattagccagtgcagtgtcaacaacatcaagctaccaagcaagacactgctactgagcggcccggtttgcaaccagcgtgttaatattaactgagtccaaccccaactagttaacgtcacgccagttaagcacgcggtcattaacagactgaaggtcaatgaacgcaggccgaaccataaaacaactatgccgatgattaatccgagtgtgagccatctcagtgcgtgggtcgcaatcagggtatgctgatagtgctgttgctgtgttaccccggttgttaggattttggcgtgcgctaagggcgtggcgagtaggctgtcgtgggtgactgcctgaagtcgttgcagggtcctgcgactagccgcactagccggcgctgatttcaaagtgaccgttagctgtgtcatgcttaaatcactactaatattagtaaaaagactgttttgataggcctgattagtagccgcgttagcaggcaggtaaaaactccggccaacttgactagcggctaaatcatgtagataggtcttcgtatttttcagtgaagcgagtaaggtggttaagggttgaacggtctgcttcaatgattggttgacgtggtgaacacgctgatcaacgtgtccagcttcggttgcgaccgtagtttgggccgttaccacgtgatttagtgcggttgtcatgcggtcagtcaggtgatctaacttggtgacctgctgattgactttggttaaatcgggttcagcctcagctgatgtcgttagcgtcgtgtcaatagcctgtaattgccgttgcacttgatcattcagttcagccaaatcattgatgcggtcggacaactggtcgaccgacttggtatggcgactagtcgctgcttgttccagactttgttggtcagtcgtgagttggctcttgagtttcgccatactcgtcagtttaccagccaaatcaatgttgatagtcgcaagttgctggttaacgtagaaattacttagtggttggccggtgggctgggtcactgagatgacttgagccacatttggtacggcccgcagtttagtcgtcaggtgatcgattgtttgtaatgattgctgctgcgttaaattctgcggtgctcgtagtgtaattgtgattggcgccgtggcaccggtaccgaagtgagcttggactaattgctgacctaattcagcattactaagctgattttggcgccagggtcgtaagttgtcatcggcaaactggccgttagcaagaatgaggccggggagtagtaacagtgcgacggccaagctcccaagcgctggctgccagtagccgaacttgctcaattggccccatagattgcgtggacgggtcggccaagccgttgttcctggccaaaataaattatcactgagccaagcggtaaaggcgtaattgagcggcggtaccgccagtaaggtgattccaagcgctacagtaatggcccaagcagcggctaatgagatgaaggcagtccagtgtaaagtgatggttatgagtattaatgggataaaaacaagtgcccactgtcgatattgaagtgtcagaattttgagactgacagtggtcggtgcggttggtgcgctcgattgccaatacgcgtacataaagtgccatgtcaatagactagtcagtattaaactgattagactagcaaggctcagcgcattagccgtcagtggccaatgccaagctaaacgcgcgttagtgataaagctaatcgttgtgatcagagtgaccacttgacacagtaagttcagtaatggcactaacagtgagcggaagatgaggccgagaatgattaaactgagcagactaccgacaagcatgctaatcagcaagttgcgacgttgttgttgcacgtgttgttggtagatcaagtccgtactggtgacactcgtattgaggtcggcgattgcaatcgcattattaagttgatttgcaatcacagataggtcagcccgggatgtctgaacggcgacaagggctaattcggtggaaccatcattggaacgtaataagtgccggtcattagtcataccggttggcgttcgaagctggttaatgccataatcatcggctcggcgattaagtttggctagggtcgtggagatttgttggcgttgctgtttggataatttaccatttgaattgttgaagactaacgttaaggactggctgttggttaacccgtgaccccattgttgttgatatttaggactcgttgttgcatcttgtggcattgcggtttgttcattcacaaacgtggtaatgttcggtaaaatcagaatacttgcaaacaccacgattccccagaaaaataagaacaaccactttggttttaataattttcgcattcgtcttgacgcccccacatcaattactttattttgacttaatcttaccatatcaggtgttagagaagcggtttggtcgtcagtttgaaaagttaattacagtaattacttgtgagttatggtatcctaaaacgctgtgggaggtgctgattttgaaaacagatcgatttcaggcgttcagtgatggtatttttgccattttaattacaattttagtcttagaatttcacattcctgattaccaaccgggacatttactggcggcactattagcgcaatggccgttgatcttgtcgtacgtcttttcgtatttctacgttggcacgctgtggttatttcatcatgattatttcaacatgctacaacgaattgatcgcaacgttaatatgctaaacttattaatgctctttagtatcaccttattggattacccgatgtcattagtggcagatgcgttgacaactggtaatcgacaggatatgcaaacggcatttattgtttatgatttggttgccctgtttatttcggcgacattttatttcatgtacgcttatctgcatcatcaccaggatctaaagaagccgggaatctcaatggctttttataccgcaattaagtttgatccggttcgaagtgtcacgatttatggcttagccatcgtggcaacgttttggtcggtatggttaggtgcaatcttactagcaggtggcatcatttttcactttttggcctacttacggatgagtcgccagctagaacaggcgaagggagggacggcataatggattattcaagtttattaggacctgatcgttatgatctagccgtgacgttagccaagcagtatcatcttgaccccagccaggtcttgttcggctatttgcaagtggttagtcaagttacgggtggtccgaatgcagcgcaagctgatttacatgagccccaagtacgagcagcaatcaatcaggaatttgatcattttttgaagcagcgtcattaattaaaaatcacgatgtgagttcagtctcaacatcgtgattttttagtttcaatcggcaggaaagaggtacggtgttcgccaggttgttgccatttcaggtgttagtgtcagtcgttgttcgtgaccagtcgtgcgtggaataaagcggtaagtacgagtcgctaacgtgatcaaacaacgatagtgcgtgtagttgtggctgatgagatggcgacggtcggcgtggtatggtaagcttacttcttgtaaccagcggaataaagtggtcggcacttgttgcggtgctagctgcggtgttcccagtcgtcgaagtgccatgtgaatgaaacgatcagtgggaatcggcccgctcggtaatggttgcttagtctgaatcacgtgctgagcagcctgacgagtggcagttgtaatctggttgccagatactgctaaataacgatttagtcggcgctgatggtcgcttaggactggtgtattggtcaggacgccggctggattcggttgcgccgtcagtgggccaccagtgggttcgatgacggcactggtgtgtgcatcactgagataccagtgaaagggatagacttcaccagtgtcatcaccccaggacgcaccgaccaggttaacacttggcagatcggcgatcacggctgcgactgattggtgttcacctaaagcccagttgatgaaggcttggggtgttaaattaatttggttgacttgtggttgagtggcgtattcaacggcgtggggcaagtacagttcagcacacaccaaaccagcttcgttaatgccgtcagccatcaaacaagccttaaagtggtcaggtagccgaccaccaccgagaatggcatactgcgtcatacgcgtcgtcgctaacccagttggccacggataacggcgcggcaaaaaaattggccgccaaggtgtcgttgttggaaagtccatggtgcgggcgaagtagcggtgattgtcagtatcaagataagttaagctggtacacatggcgcggcctccttttaattaggttcattatacgtcaaaatgggcgacagctaaatgactgtttaattaacgatggtaacggttacttttttgatgatctgcgtgtgcaaaacagctggcagtgcaatcagtgacagattaatttatggtcggatggaactcattattttctaatctttacaaacgtgctataatgaggtttcaataactatcaaagcgaggtcttcatagtgagtggatataacgtcgcgattgtcggtgcaactggtgcagttggcgcgcggatgatcaaaatggtggaacagacgagtttacctgtcaactcagttaaacttttggcatcaagccgttcagccggtaaacaattacagttcaatggtcaagccttaactgttgaagagaccgttcctgaatcattcgaaggaattgatttagccctcttctcagcgggtggctcagtatctaagaagttcgcccctgaagcagtcaaacggggtgccgtagttgttgataatacgagtgctttccggatggacccaaagattccgttagttgttcctgaagttaaccctgaagcgttgaagcttcatcatggaatcgtggctaacccgaactgctcaaccatccaaatggtcgttgctttggaaccagtgcgcaaggcatttggtttgaagcgggtcattgtttcaacctatcaagccgttggtggtgctggtaaccgggccttgaaggaattgcatgatgagacggaagcctacttaaaaggtgaagagatggaagctcatatcttacctgttgcgggcgacaaaaagcattatccaattgccttcaatgcgttaccacaaattgacgtgtttgaagaagatggctacacccatgaagaatggaagatgatccatgaaaccaaaaagattatgtgtggcggcgacatggacagtaaggatatcaaagtaacggcaacttgtgtgcggattccggtgccagtgagtcactccgaatcagtttactttgaagttgaagatcctaaggcaactgtcaagggcattcaagatgctttggcagctgcaccaggcgtggtcttacaagacgaccctgataaccaaatttatccgcaagcgcataatgcggaaggttctaaagacacgttcgttggtcgggttcgtcctgatcaagaaacgccacaagccttccacatgtggaacgtttccgacaacctcttaaagggtgctgcttggaactcagttcagattgcggaaacaatggacaagatgggcttattgcacatgcaataaaactaatttgttaagggtaatgaaaagctgatcgctagaatcaatattctggcgaccagctttttttgatgtcgaattattcgagcgttagagtcagataaaatataataagcgtcatgttgaaattaggttcgttttagaaagcaatattaagaatttgttaagctaaaactgatgagtgtcctttatccttgtcctggagtcagctccagcatataagctaagtttattcaaagttagtgaatggtcaatgagatgtcatgatgttaatttgctagctagaataaaattttaacgcaaatatggaggaattaataatgaaatcaattaattggtcaacggactatttaccagggcatactgataatttcgtgtcaaacgaggtcattacagacggtgtgactttagcggctgtttggaaaaacttagtcgatacatcgaagtggacgacgtattatgacaatgcgactaacattattttggatgatcaaacgaatactgaactaaagtttgcggaacatttccgatttgatacatttggttttcctatcgatgcccaggtcatggaactcgttgaaccgacggatggtgaaacagcacgactagcatggcatggttggcaaaatggtgatgcagatactcagtttgatgtctatcacgctttcctaattgaaaagttgacagatggccggattcgattattaacacaagaatcgcaagttggacagcctgctaaagacttagctaatcaaacacccaatccgatgttaaatggtcaccaaagctggttagatgggttagtcaaggctgctaaaaggactatgactgagtaaagtagtagctcagcaagattaataggagtgattaaaagatgaaaacatggttcattacaggaacttcaagtggttttggaaaggaactcgcgacaattgttgcacggcagtctgacactcagctgattgcggctgcccgccacaccgatgatttagcctacctagatgtttttgacgcgacgcgtattgagaaagtaagcattgatgtgacaaatgaatcacaaattaaaactggggtcgctcaagcgattcaacgttttggaactattgatgttttagtgaacaatgctggcttaggctatttttcaacaattgaagaaagtgatatggcgaaagttcgctacatgtttgaagttaacgttatgggactcgctaacgtgactaggaccgttttaccgaccatgcgggcacaccatgctgggataattattaatttatcatcggcgttggcattgacgacactaccaactatgggcttttacagtgcgacaaagtatgcagttgaggggtatagtgataccttgcggcaagaagtaaaagacttggggattcaaattatgacggttgaaccaagtggcgctcgaacgcagtggtcagggcggtcatcccaaaagatggtaccgacaattgcagattacgccgcgtttagtgacgcgattacgacggtatcggactcggttactcaggcaccgggcaatccgcaccgaattgctcaggttatgtttgatcaggccaatttggcagaagtaccggcacacttgccattaggtgaatttgcctatcaaggtggactcgctaatttacaaagcattgttagtgaaattaagtcacgtgaggacctttcattatcgacagacgattagctgcgttaagatagtggttaaacgacaatcgaggaggttcagttcagtatgagttattcaatcggacaagtagctgataagttaggagtgacgattgataccattcgttactatgataagtcgggattactgccattcgtgaagcgtaattcaattggccggcgtgaatttactgataatgatctacatttgatgaggaccattgtatgtctcaaaaatgcgggtgtgtcagtagctgacattgctacttttattgcgctcagactcgaaggtgatacgacattaaacgatcgttaccaattactcaaaacgcatgagcaggaattacaacagcggattaccgacttacaggatacgatgagttatttgaagtttaaggagtggtattatgagaccgctacggctgccggacatgaggatattcattttgtaccgggtactaatgaagttcttcccggtcttgaccaggaatatgatgcgtatttgaaggcgaccggtcaactggttgagctgtctcgatttgctaatgtaaaggattatcggttgcgcaagcgatagtccttagcagtttcagtttaatcgatgaaactgtacagaaaaactggttttgatagcttggatattggataagaataaccaaaataaaaggttctgaattgtcagttgtttgacagttcggaaccttttgaaattaaaagcagcgtatatttaagcaattagttgtaagacttgtctaactagcgccactggtacgggttgatccaggccaatgttcagccgcttttgaccggttgcgtaaccagcagttttagcagcagtgagggtcgcatcgtcaaggtcggctgaaatacttagactgacgtgggcctgataagcagcaatgctaacgtattgtttgtcatgttcatagaacggcaaattccacttgattttagcagtaaagtcaagcaattccgatgtaatcagttgggcaagggtgctcaagattggttgtgcagcgattgcagctttattgatgtaatcgttggtgtccgtgactttaactcgactaggcatttttaaaacctcctttatttacgaaatgaattgcgtcgtagcaaccaaatggttagggcacatagtgcaacggcgatgaataccgtaatctcccaaccgaatggattcttcatgaacggtaagtcgacgttttgcccgaaaaaaccgaagacaatgttgggcattgtcaggacgatggagaaaatcgtcagcacccacatcgtgttgttcaaactgttgtctagaatgttcgagtaggcgttcgacacccggccgattatgtctgaggcaatgttggccatttccaatccttgttgtgcctcgacaataatatcgtcgagccgttctaattgggccgccgagaatttgaccggtacaaaccgtttgagtgactgcaacatgtcgttattacttttaagggacgtgaggaaatagactagcgttgtttctaagtccatcaattgaataatgaccgaacgctgaatttgctttttcatcttcatctgaatgtcttggcgttgtttattgatcttgttgatggccgaaaaatattgccgtgatagcttgtacaagacgttaaagatatggtcgtatggatgcaggacatcttcccaatcggcatcgatttcgtctgccaacatatcctcaacgaatattgtgttatcggtcgtaaaagtcagtagggtgtggtcaatcaacatgaaactgacttgggcggtataagtaccttcctcaacgtcttctgtgaccacgtcaaaaataatggtcgtgatggcacttttggcgtcatattccaaccggcctcgttcgtgttgatcggttgcgtagcctaacatttcgtcggtaacgtgttcctcacttacgagttgatgataatcattttcagtgtaattattaacagcgacccagcgaaaatcgtcgcttagttcatggacttttatcattgtttttacttccagcgttttgagatatcttcaatttaacatgagttgcgagacaacgcaaaggaagttttaaggccacctaattatttaacagttgttctacttaacttttcacaccataactggtgactgcgactgaaaagcgctaacaataaatcataactgataatcagtaaaatgactgaaacgacgacgaggtagacatccaggcggttaagggtggcactaggaacgttgcctagacgattgaataaccataaatccaagaataaaagtggcaggccgattaggtagagcccactgtaatggataagcagttgccagagattggcctggtgaccactgatggttacgatctgactattgagcaggcgaccaccaatggttttaccatgccaacaccaggcgggcccaatgaagaagaggatgatatcggccaggtatagccagcgaaaatcatgtggtaatggccaattaaaatgtttgactaagacgaagtagacggtgtcaaaggcggcaattgcgagccaatcgatgaccaacgccccaatgcggcgccaattgatggggtgttcctgccaattcaaccgggtactgtggtcgcgattgcgccactgattaggaatcagatgtagacacccagcaccgacaatcccaccaagtgtgttcatcattaaatcgtcgacatcgaacatccggtaggctcgtgagtagtagccgtataatccggttaactgcgtggtttcgaagaacaatgaaatcgagaagctcgtcagggtgatcaaccagagcggccagcggtgccgccactttaagtaggcaccgatcggcataaataatagaatattgaagaacggctggaagaacgtgtcagatttgaaggcggctaaccaagtactggggtccccgagttcaaacggcgtgagtgccttcaactgggtgagaaagtagaagggttgtaaattatactcagcagttgttaggctagccacggatgagcgagtcgggagtggcagaataattagtaagtaggctgctgccaagtaccaaataaacgaataggtactgatcaagttacgctcactcagtgtttgacgtgttcggagctggatagtcaggataatcatggcgagtagtaaggtcatgatgggtaaagctaagataacgatgtgcacgggttccagcaacgtactgacaatgtgactggaaagtgcgagttgataaagttttgtaatgagttcgtgcatggctggtccccccttttttgggaatagcgctgttctttaactaatgttgactatatcatggtataaagaaattgtgacgattaatataaataaataagtaaattgttagactttcgccgtgactgctagcgtattgtcgcgaatgaccgtttcgaccatacttgcttatctaaaaaaaatatgattgaataagcataaattatgagagggtgatgaggatatgctaatggatgggcatacccacacggaactatgtccgcatgggagtggtgaagcaacggaaaaaatgattcaacgggcgatacagctaggttttcagcggtattgtattacggagcacgcaccgttaccaccggcatttcgtgaccagtatgaagggacgccggccggttatactgaggcgtcgttgcgtgagaaccaagtagccgattatttggcactggctaacggactgaagaccaaatatgccgggcaaatcgagatctcagtgggttttgaagttgatttcttaccagagcatgttgcttggacgcgtgattttctgaatacctatggtcctcggacgcaggaaagtattttgtcagtccatttcatgcgggggttacggcagcatttctggtgtgttgacatgtcaacggatgattttgcagccggttttgggcagtggcttaagacgccccaacgtgtttttgaacagtattatcagacggtcttggcatcagtacaagcagatctgggcccttacgcaccacaacggatcggccacatgagtctcgtccgcaaatatcaggattactttggcttgactgaacccttggatgtccataatcttcaattagtagatcagacgttggcgttagtgaagcagcaacggcggcagttagatttgaatttggctggtctctacaaaccgtattgtaatgatttttatcccggtcaacagattctacaacgcgctcaaaagcttgacattccgctggtttatggctctgatgcccatgacatagccagtgtggggcgtggctatcatcttataaaaaaattaattgagggttgacagccgtcagtttagtgattacaatgaattataaattaaacgactaatcaaattttaataaacggttgtgattagaacaagtaattaagtcttcctcatccagagagcccgggtagctgagaaccggacagacaggcttaacgaacacacatctatgaactgctaaggtgaaccagtctcattagccttagccgaattggtttcgttatccaagttgacttgatcaacatgaggtctgccgtgcgaacggtagatgaaataaggtggaaccacgcgtaaacgtccttttagcaaattgctaagggggcgttttttagtttcaccgatccatgcggtaagtttgcgtgacggaatcgcaagtcgctccggttagcatgtaagcaattgattaagcacgttgataagtaacgatatgaattaaactgattagttttaaaaataacgacgttttaggaggcgtaaattatgttgaaacacttattaccactaggaacccgggatgaatttggtcggcgggcacgtaccaaacaacacttgatcgcggtgatccaagcccattttaaacaacgcgggctcgcgccaattgcaacgccgttattagaaaacgaagcggtgtttgatccatatcagatgggtaactaccaactataccgcttatttggcaacgatggtcgcaccttggtcttacggccggacatgaccttaccagttgctcgcttcattagcgcgacgaatgtccccttaccgcaaaagtttggttatgtcggcgatatctttcgagtaagccgtcaattatcaggttcatataaccaaatcacacaagcgggagtcgaattagtcggttacgcatcgctgaaagccgaatttgaatgtttaacgattgccaaccagctttcaagtgagctgattgccgatgctgttgaaatcgaattaggagatgcccaatttgcacaacgggtcgtggccagtttgactggtgacgaaggcgaacaacaagccattttaaccgcactgttcgataagcaagtaccacgctacacgaagttgattgccaagtaccgcgcacagcctttatataattttctcaaagcatggccgcgtttgttcgggcgtccagaacgtatcttcaaagaattagcggcagcaccactacctgaaacagtccaaccaagtctgaaacggcttaaaacggtggtggcctggatgcaacaaacgatgccggagcaggtcatctcggtggatttgagtagccaagcaccacaaaaatactataccggcctgacttttcggggttactcacaagcgggacctggctacccgttcagcggcggccgttacgacaaactgttaacgaactttcaagctgaagcagaaccggctgtgggaatggggttagacgttgacttgttaacgactttagccaccgaccaacagaccgcttatgctgaacaattgatttactttgagcctgaacagtggtcacaagcggaggcatacttagcgaaacaaccgcacgccattttgagtttggcggatgacttagcaggtgcgcgcatcgaagcacaacgtttgaatgcccaactgattgatttaactggaggtatgaccaatgactgaaccacgtttaaagattgccttgactaagggccgcgtcgaacaacaagtcctgccgttgctggaagaagctggactggattgttcgcaagtccgcaacaagcaacggcggttgatttttgattctgagacgcaaccatatgagtttattttagcgaaagggccggacgtgacgaccttcctcgaacggggtgctgctgatatcggcatcgttggtagcgatattttgactgaacacgagagtacccaatatgaactgttagacttgggggttggtaagtgccaatttgtgctagcatccacggccgactttgatcccgttgcaccacgacgcaaaatcatcggcaccaagtacccattgattacccaacggtattttgatcgcttgggccaagatgttgaaattattaagattgaaggctcggttgaattagcaccactgactggcttagccgacgccatcgtagatatcaccgagacggggaccacgattcgtgagaaccatttacaaatttatgactatttacaaccagtctcgacccgcctagtggtcaaccggttagccttaaaacagcaacaagccgccatctttgatttagttgatcggttggccacagttgttgatacgaataatccaaaggagtttgtctaatgaaaattattaatgaagatttagctagtttaaaacgcttagttcaaacgaagacccaacaattgactgacttaaaggttgaatcagcggttcgcgaaattattgccaatgtgattaaaaacggggatgccgccgtcaaggattacgaaacccaattcgataaggtcaccttgaccgactttaagttgtcacaaactgttattgatgatgcttataacaatctggacccgcaagtgaaggacgccttgttgttagctaaacgcaatatcacgagttttcacgaaaaggaaaaggcgactggctttattgatgctgaacagcctggcgttctacgagggcagaagttaatgccgcttaatcgggttggcttatacgttccaggtggcacggcagcctatccatcgactttactgatgagtgccttgcccgctaagattgccggcgttaatgaagtcattatggtgacgccaccacaagtcgatggcatcaatccagccgttcttgctgcagccaaaatcgctggcgtcgacgccatctatcaagtgggaggcgctcaagcaattgctgcgttagcttatgggactgagtcgattccagcggtcgacaagattattggtcctgggaacatttttgtggcgactgctaagaagcaggtctttggtcaggtggcgatcgacatggtggccggcccgtcagaaattggtattttagcggatgattcagctgatcctcggcaattagcggctgacttattgagtcaagcagaacatgaccgtcgagcccggccaatcctaattacggatagtgccgacttagcgcaggccgtcagtgacaacgtgacgtcacagttgaaagttttgccacgagaagcgatcgctaccgacgctgttaacgaaaaaggcttcattgccgttgtcgcaaaggttgaagaaatgtttgacttgatgaatacggtggcaccagaacacttggaagtgcaattgaagaatccaactcagtacttgaatttaatcaaaaatgccgggtcggtcttcttaggacgctacgcctctgaaccactcggtgactacgttgctggtccgaaccacatcttaccaacgagtggcacggcccgtttctcatcaccacttggcgtctatgatttcgttaagcgaacgtcctttatccaatacactaaggacgctttggctaaggaagctccggcgattaccacgttggcacgggtcgaaggtctggaaggccatgctcgtgcgattgagagtcgttttgacacctattacgattagggcgtaattagtagttgatactgattgtgattacagccggtagtcgttttagcagatgaggaggaaatgaacatgcgacaagcaacgattaaacgtgaaacgaaagaaacccagattgaaatcagtttgaatttagacgaacagagcggtatcgaaatcgataccgggataggctttttgaaccacatgttgaacttatttgcgaagcacgggcgcttcgggttggtcgtgaagtgtcacggcgacctcgacgttgacccgcaccacactactgaagatacgggaatcgtgcttggcgaatgctttaagcaggcgttgggtgataagcagggaattgaacggtacgggacggaatttgtgccaatggatgagactttaggtcaggtcagtgtcgacctaagtggacggtcatacttagtttttgatgccgagctcacgaatccgcggctcggtggcttagatacggagacagtcgaagatttcttccaagccgtggcctttgctgctgaaatgaatttgcacgcacgcatcctgtacggccgtaacactcaccacaaagttgaaagtttgttcaaagcgtttgggcgggcaatgcgcgcggctgtcacgattaatccagatattcagggggtcaactctacgaaaggcgtgatttaaatgtttgcaatcgtcgattatgatacgggtaatacccgtaatttgaagaaagcttttgactacctgcaagtgtcaaccatcttaacggctgacccgcaacaattagcggccgctgacgcagttattttacccggtgtgggagctttcgcagctgcaatggccgctttaaaagaacgccagttagtcggcgtgttacaagcattggcgcggagtggcaaacccgttctcggtatttgcttaggcatgcagctcttgtttgaaagtagttccgagtacggcgagcatgctgggctaggcttgttaagcggccgggttagcgctttgccaacggacttgaatgtcaaagtcccacagatggggtggaatcagaacgagcttcggcgtcctgatagtccctttgccagtattgacgcggcctatacttacttcgttcattcgtactatgcggtatgtccggcaactgaaatcgtggcgacagttcaacacggcgtccaggttccaagtattgttcagcatcaaaatgtgattgggatgcagtttcacccggagaagagtggtcgagtcggattacaacaactagcagcttttaaggaaatggtgagtgcaaatgatttttccagcaattgatttacgagccggtcagagtgtccggctctaccaaggtgattttaaacaggcgacattgattaatcctgatcctgtcgttcaagcccaacaaattaacgcagcgggcttgcagcaattacacatggtcgatttggatggtgccaagtcagggcgcccagaaaacttcgcgacaatcacggcgatccggcaagcatttaccgggacgatcgagctcggtggaggtattcgaacctacgagctggcgactcgttatctcgaattaggaatcgatcgcttaatcttggggtcagttgcgttgactgatccacgactggtcaaacgactgttaagtgagtttggtggtgagcgaattgtgattgggttagacggaaccaatggttatgtggcaattaaaggctggttggagcagtcacagaccaagatgagtacattaatgaagacaatgactacgagtggtgccaagcactttatcgtgaccgatgtcgcccgtgatggcacgatgcaaggccctaaccttgcgttataccaagaactacaagcacaggtgcccacggccaacctgattgccagcggtggcgttcggaatttgaccgatgttcaagtgttacaagccagtgggttcaaggatgttattattggcaaggcgttagctgaaggcggtgtgacactggccgaattagcgggggtgactgaatgttagcaaagcggattattccgtgcttggatgtggcggatggtcgggtcaagaagggcgttaatttcgtcaacttgacggatgtcggagatccggtggcgattgcagctgcctatcagcaacagggcgcggatgaacttgtctttttagatattgcagccaccaatgagcaccgcgagacgatggccgccatggtcgaacaagtctcagctcaggtcttcatgccactgacgattggtggcggaattacaagcgttgctgatatgcaacgaatcttacgtgcgggtgctgataagacggctattaattcggctgcagttgccaaccctgaactgattcgtgccggtgctgaaaaatttggtaaccagtgcattgttgttgcgattgacgcggcgtgggatgcggcagctggtcaatatcgtgtctatacacatgggggtcagcaagcgaccgacctcgatgcagtggcgtgggccaagcaagcggtcgccttaggggctggcgagttattggtcactagcatggatcgcgatggcactaaggcggggtttgataccaagttatatcaggccctgggagcaacggtcaatgtgccaatcattgccagcggcggtgcgggtaacttacaagactttgtggatgtttttagcacaaccccggttgatggtgcattggcggcttccgtctttcactttggcgagttaacgattgcagatgtcaaagcgacattaagaaaacaaggagtggtcgtaagatgaaaccagactttgaaaagggtgacggcttactgacaacggtcgtcaccgacgcggatacgaaggatgtcttaatggtcgcgtggatgaacgcggaaagttatcaacggacattggcgtcgggccagacgtggttttggtcacggtctcggcaagaactttggcacaaaggcgctacgagcggcaatttacaagatgtcgttagtatgacgttggattgcgatcaagatacactattggtcgcagttcatccgcatggtcccgcttgtcatacgggacatacgagttgtttctttaacccggttgaactagaacagggcgcctaaggattgatgacgatagccgaatgagttgggagttagatggctgattggttggaaaatgcggtcccaacggtcgataagcaggattgtttttaacccgtattaaattgatgaatatattatagaagaaagtggtgtcgaatatgcaaaatatggaagaattatacgaactgatcaaacaacggaaggcaacgcctaagaagggctcctacacagattatttatttactaagggactggataagattttaaaaaaggttggtgaggaatcaaccgaagttattgtggcggccaaaaatcccggtgacgacgaattaacctatgagacagccgacttgttgtatcacgttttagtgttattggtcgaacgtggtgttagttttgaccagattaagcaagaattggctaaacgtgaaggtaagatgagtgactataaggatcggcccgaaattaagaacctataggaggtagccgaatgaaagctagtattgaacagttagaaccctatgtgcccgaaaagccgttggcgaccctccaagctgagttaggattgacagaattagtccggttatcagctaacgagaacccgtatggcacctcgccaaaagtggcgattgctgtgaagaattgggacttcacccagagtaatcgttatcccgatgccgacgcacaggagttacgacaagcagtggcccagcaacagggaatcgacccgaatagcatcgtttttagtgtaggtcttgatgagatgatcgtgatgttatcacggacgttcttagccaccaacgaccaggtgctagtgtccgcaccgacgttttcagaatatggactacatgctgagatcgagggggggcaattaatcagtgtgccaacgttgcctaatgaccatgtgaacttcgaaggcttaatgaaggccattacgccccacgtgaagatggtttggctgtgcaatccgaacaatccgacgggcaccgtggaatcattagcggcaattgaagcgttcgtccagcaagtacccccggagacgatggtcctgattgatgaagcctacattgattttacaccgggcgcggctcaagtaacggccatgcagttaccagccaagtacccgaatgtagtggtcatgcggacattctccaaagcatatgggttagctaactttcgaatcgggtacgccgtttttaataccaaatatgccgcaacgatgcaaactattcggcttccatacaatgtgaattccttggctcaagtggcagtcctggcggcaatcgatgatcctaattttgtgaaacaaacggtccaaaaaaatgcgacggaacgtgctaagtggatggcattctttgatgatcagggtgtcacttacgatcaatctggcgcgaacttcattttctttaagtatccgagtgccacgcaactggctgactatctagtgcaccatgggtatctgattcgcactggcttacggccagggtggttacgactaacggtcggaacggctagcgataatcagcaactccaacaattaattcgtgagtttaaggcctagaattggcgcaaagaaacctgagtaatcggtttctttttttgttgccctaactgctgaataaattcgaggcagctggtccgcaaggatagttgtcaataacacctgctaaaccattaactcaagtgttgacttcgacgccactctaagcagtaaaattagggtgataaaatacaggagggacaacaatgtcagaattagataaattagcagccggggaatggtatcaatttaaagatgctgaggtggccgctcaaaaagcgcgggctgccaagttatgtcaagagttcaatcagatcgatgcaacaaatccagatgcgcaaactgccaagattcaagagattcttggtagttacggtcgcaatctttccgttcaagcagactttaattgtgataatggtcgtaatattcatgttggtgataattttcttagtaattataacttaactattttggatatcgcgccagttcatataggggataacgtgatgattggccccaatgttgatatttatacggtcaatcacccgttgacggctagtggtcgacgtgctaacttggcccagggtcatccagtcacgattggtcatgatgtttggattggggggagagcggtgattacgcccggcgtgacgattggtaataatgttgtgattgcggctggagcagtcgttactcatgacatgcctgataatacgttggtggccggggtaccagccaaagttattcgacaattagaataagaaaggtcgcaattggctagctttttgggcacttattttactcattggcatgatgagtcgtaaatacgacgaaaataaggtttatttttgaaaattagtccacgtaagcggcaccaattatttttacaggtatacttagattaacaaactaatattaagagaaagaggatgccgtttgttacatttaatcgaacagttgtatggacccttcttcagtgcgactaactggggtaacgtcatcacatctgctaatgactggttaatcattttatcgttagcaattattgagtgtttactatcagttgataatgccgttgtcttagctgctcagacccagagtttagataatttacaagagcgggaaaaatcgttattctatggcttgtggggggcctatatctttcggtttttaatcattgggattggcacgtatttgatcagtttttgggagatcaaagtgttaggtgcggcttaccttgggtacttggtgtatcgatactttagtcagccgaaaaatggggccaaggtggcacagaaacccaagcaacaacgacgcttcttcggactaagcaacttctggtcggtcgtcattcagattgaaatgatggatatcattttctcaattgattctgtattggcgtcattggcaatttcggataatccggtgattgttttgattggtgggatgattgggattgcctgcatgcggggcattgccgaggtcattatgcgcttaatgcgcaagattcccgagttggaaaccatggcgtattgcttgattgtcttgattgccatcaaattatttatctcaattcctgccattggttgggatattcccgcaacggcttttggtggtatcgtattagtagcatttattattacgttgctgattcatttttggcgtcggcgccgcaatgaacagtgcgtggaaggaaaggtgcgtaaatgatgaaattaggttggattggtaccggcgtcatgggggcagcgattgtccgtaacctgatgacggccggctatgacgtaacggtttataatcgaacaaaaagtaaggcggatgcgctagttgcggcgggggccacttgggctgatacaccggctgccgtggcagaaacgagtgacgtgattttcaccatggttgggttcccacgggacgtcgaacaagtttattttggtgatcacgggattttcagtggattggccgctggaaaaacggtaattgacatgacgacgagccaacccaagttagccgttaaaattgcgacgtacgcgcgtgaacatgacatgcacgctttggatgcgcccgtgtccggcggtgatattggcgcccaaaacgccactttgacggtgatggtcggtggcgatgccgatacgtacgaggcgatgttaccattatttaatgtgcttggtcacaaggtcaatcattttggggatgctggtactggtcaacatgccaagatggccaatcagatcatgattgcagggacgatgactgggttaactgaaatgttattgtataccaaggcagccggtcttgatccggaaaaagtcttggcaacgttatctagcggtggtgctgacaactggagcatggataattacgtgccccggattctgaaggacgattacacgcccggcttttttgcccgccattttcttaaagatttgcggattgctttgagtgaggcggatgcgatgggacttaatctggttgcgacggcgcaggctaaacgactttatgaagtaatggtcgatgtcaaaggcttgggtgatcaaggaactcagggattgattaatatttattagcgcgtggctgacttgatgaaagtcgctcaaacatcatatatttattgaaataatagttatcaaggcggggattcagcgagtttaatctttctgaatccccgccttttattaacatgatacgcattatgcgagttaatttgtcatgaatcgtgattaaaacgtgccagttaaattactgttcgtcagccggtgcgcgtcctatgccgacctccggggctgggtgccaattgctggaacgcagccgacgtcgatttgagctaacgcataacccgcgtcatctcaaatacgagtcttattctaagccggaagaaaaacacttccagctaagaataatttggctactgagcattgtcacccagcccctccagtcgggaagccgctcaaatggcaaatgaacagccacttaacttggtacaattagtcgctgactatattttttactggaaatttaaacataacgttagggtggcgttaaccactttgtcgagacgtttaattattactatggtgatttgggaatagtaaattatcacaatatcattttctgtctgacagttgattgacaaagttatcgtttataaaaagcaatgacaagtccatcaatgattgggtacatccatgtccgccattcgaacactgtcccgactggaaagcgtttcggccaatgctcagcactgccaagagtgtgaggttcagacgggtgagactgaggattagcctagctagggcgttaagcggtgaatttccgcttgacgtcatagcgtagctaaccggaagtctcagtctgacccgagcacgtttcactaatatgccattaaagcgtggaagaccagtatttaagactggtctgcggcttaaatctgtgtccaccgcgttccagcaattggaagaaatacctggaagtcggcgtaggacgcgccaactaagtaattttacgctaactcgaactttttccagcaggcctaagctggctgcttttgaactgacataactggcacgttttaatcacgattcatgctaagtaataactagtacaacgtctagcatggtattttatgaaacgatatctgaaaataaacttggtatactgtcaatcttgatgactagcattttgatgcattaaaaaacggattcttcagcgatgtgtggctgagggatccgtttgatgtattaaggcttaattgatttagtttaaggttgcggctgctttttgggcagcgaggttgatgatgttccaaggacggtcaaagcctggttggaagaagaagtccgtgtaagctaagtcagcaacagtcagtttagcttgaatagccactgagatggcgttgatgttagcagtaacatcgtacttcgacatgatttgcgcaccaagcacgcgaccatcagttgggtcaaaggttagtttgaaccaaactttggtgttgccagcatcttcagagacaaatttaggccgaatggtatcggtgactaacacggatgccgtcttaacgcccagcttgtcagccgtgccttctttaacaccagtggaagcaaagtggtagtcaaagacggaaagtgcggatgaaccagaaacagcaggcattggtacgttttcgccaagtaagttcttagcggcaatccgaccttgccgacgagcgttagtggctaacgcaatgcggttatccttgccagttggggcaaatgggactaaggtcgcgtccccgacggcgtaaatgtcagtgtcactcgtttggaggtggtcgttgatcttgatcaaaccgtgatcatctaagtcgacaacgcctttcaagaaaccagttgctggccgaatcccggcggcagttacgaccaggtcagctggatattcgccttgatcggtcactactttggtgacgtggccgtcaacaccttcatacgctttaataccttgtccaactgcagcatagatgccgtgatctgccatcgtcttagtcaagatatccgtgaattcttgatcaaggtaaagactaagtaaacgtggtaataggtcgataaccgtgacgtgcatgccagctttggcaaagacttcagccgcctcaatcccaatataaccggagccaatgacaaccacattcttaacgctagggtcaacggtcttggcctttaatttgatggcccagtcgcgtccacgcattgcgtagatgttggctaagtcatggccgggtactggtaggtcaaatggtaccgcgccgacacttaggactagtttgtcataagtttcatcacgttcgtcaccagtggcgtggtcaatgacgtgcacactgtgactagcagggtcgaccttactaatttcactatttacaaaaacgtggacgccttgggcttgcatgccagcaggagtggcatagctgacggagttaacgtctttaacggcaccttcgaggtataattgcatcccacatgagaggaatgacagaaaatcacctttttcataccattgaatttcagtatctggttgagcggctaaaataccgcgaaccgtttcataaccaccatgagaagaaccaacgacaataactttcataattgtaaagcctccaaattttagtttagaactgttctaaatagaatataacacgaactaagtttgtcggcaagggcagtttgtaattattctaaattatcagtgaaaaatagctgtgcccgtcgacaccatttagtttagaaatattctagttagaatatagcactaaaataaattgttcacaactaaaacggttacaattagctgcaaaaaaacacccaatcatcaaaaaattgatgactgggtgtcagtattaatagggatggacttaatgattattcaataatatcgaagaaacttagcaacttttctttggtcaattgggctttttcctcatcacgaacatcatacttaatctggccctgatcaaggacaatcaggcgattaccatagcgaagcgcatcgtctaaatggtgggtgatcatcagacacgttaacttttcctccgtgacccgttgattcgtttgtgtcattagttgagcgctggtcttaggatcgagtgcggctgtgtgttcatctagtaacaagagatcagggcgctgctcggtagccattaaaaagctcagagcctggcgctgccccccagataaattttctgttgccgtgttgagccgagctgaaagaccgttgccatccatcgtttccgttaaggcttgaaagtggggcaggtgctttttcaattggcgtaattttaacgtacgtcgcttaccacgttggctggcaagcagtaagttttcggcaacggtcatccggggtgcggtgcccatcttggggtcttggaaaacgcgcgccaggaaagcggtccgcttttcaacggatagtcgggtgatgtcctggtcacgtaactggatggtgccactatcaaccggtaactcgccactgatcgtgttgaagagggtcgacttaccagcaccatttgaaccaagtacggtaataaaatcaccatcatagacgtctaagttcaggccccgcaaaattttgacctcattcggggttcccgaattaactttggtcacgatattttttaatgataataatggggcactactgttcgtcataacgggccactcccttctttaaaacgtgattaagatgtagaactttactgaattgcggtaacattaagcagattgccagaattaatgcggataacaggttcatgtcgttggtgttgaagcccagttggaggactaacaggcgcacgaactgatacaaaatactgccgagggtaaccgcaacgagtcgttgattcaacgttaattcaccaaagacaacttcaccgatgatgatcgaggctagcgcaattacgatgattccgattcccatgctgacatcggcataaccgttattttgcgcaattaatgcgccgcccaggccaatgataccgttagagaccatcaatcccatgatggtcatgttatcggtgttaataccaattgaacgtgccatttcacgattgtcaccagtgacaatgaaggcttggccgaggttagtttgcaagaagacaattagaagcacggtaatgatactgatcactactaggccaacaaagacgctgtcaaaatatttaggcagtgattccaaaaagtgattagaaaaaatagtttgtttgcctagcaatgaaacgttggaactgccgcccataatgcgcaaattgattgataagcacgcggtcatcactagaatcccggctaagagaatgggcactttacccttggtataaagtaggccggtgaccaggccggtaatcgcgcccgcaacgaaggctaacagggaagcggtaacggggcccattccatggctaatcgccatgacaacagtggccgcaccgagtggaaacgtcccttcgacggtcatatcaggaaaatcaagaattcgaaatgtcaaaaataatgcgacgcctaaggttgcccacaagaggccttggccgatactcgatacgatcatactcatttgtaaataacccctttcgctttggcttctttaaggacacttgctgggaacttgatgccgagctttttagcttcacttaaattgatggtcatcttacccttagtgatgactttgattgggtagtcgctagttgctttgccctttaaaacttgggctgccatttcaccagttagtttaccaagttgatactggtcaacggataaggttgcgagcccgcccgctttaaccatcgtatcaacggctggaatgactggtaccttagccttatttgtaacggagactagcgttttcatggcacttgcgacgccattatcttgcggcgcataaacggcgtcgacattggcggccatggtttcagccacttgctgcatatcgttggtgttagagatagtatataacttgtatttcacaccttcttgtttacaaatccgtgcaaactttttggcgttatattcaccaccatgatctgaagtggtgtaaataattccgattgttttagcgctgggaacgagcttccgcaacaagtctaagtgggatttcaatggagattcaccagaagtccccgtaatattggcaccgggatgttggtcgcttttaattaggccgctacccgatggatcagtaatacctgctaacataacaggggtttgcttgttagccgcagaagcgagggcctgcgcggcgggggtggcaattccgactgttaacgcggcgttttcgttcatgaatttttggctcatggttttcaagttactttgatcgccctgggcattttgatagtcgattttgaccgtcttgccatcgacataaccatattcctttagaccagcgaccacgccacgatgaatcgcgtcgagtgcggggtgggtctggagttgaagaatgccgaccgtcggcactttctttgtactggtcgtcttcgtggcggtggttttgcctgtcatgacaaaggccactcccagaaagacgatcaaggcactaatgaatgcaatcatacgtttcaatctaatcacctcaaaaaatttcttaagctcgggcaagttcaaagccaataaaaaagggcaaaccagtaagctctggtttgccctttacggaaccgaagcctgctgtgttaaaacccatgcagacttctttgaatatcaaagtgagccggcacagatacaaactgtttgccagattgtatccgtgtggacggcactacaatctgaacggccggctttgccatgaactgttcaagttagtaactgactttgacatgcttggttcctcgctttcgttattgaatgagttcagtataggcaaagtcgaaaaaagtgtcaaggataaatttcaccaaatattaaaatttgtggtgaaaatcttgtgagatgcggatgcttggtcgtcggcatttgttcgttctagtccgacctccggggcggggtgccaatggctggaacgcagccgacgtcgatttaagcccgagcaaaacccgcctggtctcaagcctgtgaggggccacggttgaagccgaacattgtctagtaacggattaatacggttttgacattagtctgttggcgtagcaagcacagaatttagtggtaccgaacacgtttcgggaaaccgctcgaatggctgatgaacgaccaccgagcttagtgcaacttatcggtgcctattttgatactggcactttaaacaaagcgttaggttcattaaagcattctgttgagagattaaatcttactacaccgattcaggattagtgagctatctcaatatcactttcagtctgacagttgattgacaaaataactgtttataaaaagcaacgacgaattcatcaaaagttgagtacatctttgtccgccattcgaatactatcccgactggaagacgttccggcaattggcagaaatgcctgtaagttggcttaggacgaaccagcaaagcatgtttacgctaactcgcacgttttccagcgggcctaagctggctgcttttgattttagttattcagcaagttttgaataagcattcaagtaaaacataacgaaaaaacaataaaatgagttgacaatgaataaaggcggtgttaaattagttttaaattaaaaacagattaagacgttgaagagaagagtaatcgcatcactgatttgcagagagcttcgtaatggtgagagaagtattcaggagtgcggtgaagatgagcttggagtcatgatgcgggtcgtagtggctacgcatgcggtggcaaccgatatattgcggggtttcctagatttttcagggtactcgtcgaggttgtgatcgtgagatggcagcgaacaacggtggtaacgcgaaagctttcgtccgttagtttctaacatattagagactaatggatgggagcttttttttgtttcaatacaggtgagagggagcggttagatgacagtcacagcaaataatggattattagcggcccgtggagaatgggcgaacgcaacgtgtcaagaaagtcatcaggcacaacagattttaattttaaacttgatgccgactaaggtaacgacggagcggcagttcctaaagcgttttgcagccggtaacacagatgtggctgtgacgtttatgtatcccgcgagtcaccatttcaagagcctgccacaagcagtggtcgcggcacattacgtgacgttggctgatattcaagatcagtattttgatggcttgatcgtcaccggcgcaccagttgagacgttaccgtttgaagcagtcgattactggaacgaattgttaacaatcattgattggtcacgacagcacgttagccagactttatttgaatgctgggcagcacaagcagggctatacgcacagtttggaatcgcaaagcgcgccgttgctcacaagatattcggtatttatagtgcgactagtactgatgttaagtcaccgctgattagtggactgaatgcaggaggtttgctaaaaatgccacagtcacggcatacagcactagtgatgccggaacgcttacccgctggattgcaggttgtcgctgacaatccgaaggtgggaccgctcgtcttatctgcccccaagctgcacgcggtctatgtgaccggtcatcctgaatacgagcgccgcacgcttgccgatgaatatttgcgcgaccgacgtaagcacttgccgattcagttacctgaacattactttgctactgaacaattaacaacagttgattacagttggcaaacttcaagcaatcaactgtatcaaaactggttagcaactttgaatttaacgaaagtaggttattaattatgacaacaacgaatcctgaaaattatcactttgagacgttacaagtccatgcgggccagacggttgatgaaacgggcgcacgggccgtgccaatctatcaaacgacttcatacgtctttaaggatgccaagcaagccgcgggtcgctttgccctgactgatgccggcaatatttatacacgactgacgaacccaacgacggacgtggtcgacaaacgagtggccgccttggagcacgggacggctggggtaacgctcgcaacgggttctgctgcgataaccgcggcaattttaaacattgcgcaacagggggatgaaattgtggcggccaacaccttgtatggtgggacctatgacctgtttagcgtgacgttaaagaagttgggcatcacaacgcactttgttgatcctgacgaaccggcaaattttgagacggcaattaacgatcatactaaggccttgtacgttgaaagtatcggtaatcctggcattaacttagttgattttgaagccattggaaaaatcgctcatgatcatggcattatttttattgttgataatacctttgggacaccatacctagttcggccacttgaacatggggccgacgtggtcgtacattcagcaactaagtttatcggtggtcacgggacgaccatgggtggcgttattgttgaaggcggccaatttgactggcgtgcgagtggcaagtatccagatttcacaacgccagatccgcaatataacggcctcgtttttgccgatttgggcggggcagcctttacgactaaggtccgggcggaaacgctgcgagataccggtgcaactatcagtccctttaattccttcttgttgttgcaaggtctagaatccttgtcattgcgagtagaacgacacgtgaccaatacacgcaagattgttgccttcttaaaagcacatccaaaagttgcctggatcaattatccagaactggaagatagcccgtaccatgacttagcaactaagtacttcccgaatggggttggttcgatcttcaccctgggcttgactggtggtgaggctgctggtaaggcattaattgaacatctacaactcttttcattgttagcaaacgtcgctgatgctaaatcattaattatccatcccgcttccaccacgcatgcgcaattaaatgaacaggaattgttagcagctggtgtaacgcctgacttgattcgaatttcagtgggggtcgagaacgccgatgatttaattgctgatttggatcaagcattggcacaggtttaataggtcggaatggtcgatgattgaaagtatatgaaacggagggtgcgacaatgacaacgacaattgaagtgggcatgttagggttaggaactgtgggtagtggggtggttgaacggttgacccgctcggctgccaaaattgaacaaacgcagggtattcggttgcacctagcagcagttgccgttaatcatttgaacgcgcctcggactgttcagttaccgattgggacgcgcttgaccgattcattaacgaacgttgtttgtgaccgaaaaatccaactagtcattgaagtcatggggacggtcgcaattgctaaaaaggccattgtggcagcacttaatcagggtaaggctgtcgtgaccgctaataaagacttaattgcaacggcgggacctgaattggctgcgttagccaaaaaacagggctgtgatttattttacgaggctagtgttgcgggggggattccgatcttgcggacattaacagatagttacgtgacggacaatgtgcaggcggtcagcggaatcatcaacgggacggctaattatatgctaagtgcaatggcaaccgggcaatcgtacgaacaagctttagctactgcacaagcagccgggtacgccgaagctgatccgactaatgatgttgcgggcattgatgcggcatacaaattgatgatcctcagtcgctttgcttttgggcaagagttgagcctgccgcagattgcacccacgggaatcacgcatttaagcgcttcggtttgtcgattagcagctgaaaatggctggcagattaaattgctcgcgcagattcagcgacacggatctggtttgtattgtcgtgtggcgccagtggccgtgccggttgatcaacccctgagtcagatcaatggggtccaaaacgctgtagctgttcaaagtgaagccattggtaccagcttgtataccggaccgggtgcgggaagtacggcgacggctaatagtgttctaaatgacgtcttagtagcggccaagcaccttatcaatggttatcgaatgattcgtaaccagaaaagaagtgtctcgttaacggtcactcgatttgaccagttaccacaaacatacttaggcattggtccggtcgcaccagaagccgtgaaatattacgctaatgaagctgatttctcagtaaaaacgattgccgatgattgttatcagattactggattaagtgcggtgaaacgcaaaaagctgcgtgcgaacttgccactgactttgataccaattgccggtacaacggactggaagcaagtgaccgaaaattcaataacatctcccataaatgttgcaatttgaaaaagaatgctcaggtacagtatactgtatctgagcgtctttttttgatgctaagttcccatgggatatccatggctaagtggatgagctaattgaaatgagttagcgagacgtggcagttggttgactgacacgatgaggagtgaaattatgaaaattgcggtggtgaccgaaagttctgctaatttaaaagcgcaggcggtgaaagactaccaaattacggtggtgaacgacccgattatgttcggtaatcatgtttaccacgagaacgtagatatcacgacggatcaattttaccgattactaaaagttgaaaaagaaattccaacgatttctcaaatttcaatgccagagatgcaagtcgtttttgatcagctgcaagcggcgggctatgaccaaattctagttattgggttgagtagtggtatcagtggctggatcaataatttgaagacctatgcgccgtcagttgacggtattgacgtgcgggtgtttgattcacgaactgcttgcgcggggacggcgaacatggtgaagctggctgcggccatggcattggcggactataccttagatgaaattattgcgcaactgacgcgcttgcgggcggctacgacgacggtcttaatcgttaactcgatgcgccatctagttaaaaatggccggatttataacaatagtagtctggccggaacgatggtgttgcgcaataagccgattattacgttcaatgggcatgggaagattcaacttttaggtaaggaacggacgcttaaaaatgcacaacaggctgttcaagatgaatttagtcagtttgtgatgaacagtcaattaccagttcggctggacgtcatcagcgctaatgacgcgcagattgccgaagattgggcgagcgaactacgttatcagtttccagcagtccgggtcaagactggggttatcggtccagttttaggcgtcttgactggagaccatgcgctcggaatgatctggtcattagattggaagccattgttgacgaccctcaatcaggagcaaaaacaataggccgttggggttgcccgtgtgcggtttgctgatgatactgtcgtatacagacagctgggttttaaaaaagttttgcatcgaaggttgacattttactaaaatgatattatggttataacattaaaacttgatgaaaagctataatgctttaaggagtaactgacttgtgatgctcagaaagcgccgttgctgtgaaggtgtgatgacaagtgagtaaaagttaaaggattggcgtgaattttacgagattcactggtagcacccattattgtgcacgcgtttagttgttgtgaacgcgatgagtagccggatgtgagttcggttagcaataaggtggtaccgcgcgtaagcgccctttggataatttgatcgattattcaaagggcgctttttcgtcaagtgacacatagcattattttttagttaacacatagtagtcattatttaggtcgcgcatcgcggttaatcatcgtaaacacatagttgttcgacatcacgtgacagcacatagtagatcgtaagcacgggcccgtttattggaaaagcactgaagcgagcggggaacatatacacatagtgggcaagacgaaaggatggttttacttatgaaatatggcattattggcgcaggcgcaatgggatatcggtatggtgtaatgttacaagaaaacgccggtgttgacgttgattttatcgacacgtgggaaccaaacgtcgcaaaggtccgtgagcagggcggcgttgatgtggcgcgtgatcatcaaaatcaccatgtcgttccaatcaatatttattatcctgaagaatatcagggtcatccagatgtttggattgtttttaagaagcaaatgcagttagccgatgagctcaagcgcgatgcgtcgttatttcatgaggaccagtacgttttcgccgcaatgaacgggatggggcactttgaaaagattgcacaatatttcccagaaaatcacattattggtggtacggcgatgattgcaacggtcttgaatggtccgggtacggttgattttatggggcctaagggtagtgaggcgatgcatatgagtaagtatgcaggtcctattgatacgactaccaagcaagtgatggccgattttaaggcggctgatttaaatccgatttggtctgataattttatgggcatgtgcatgtccaaagttgtgtttaacgcggtcaccaatagtttgtgcacgatgttcgagattcagatgggccaattcatcgaatatccgggcgtcaaggatatggcgactcaaatgttcaacgaagcctatgatgcttgcgaaagggcaggcatcaaactcattgagacgcggcaagaagaaatcgactcggttgaaacggtcagtcgagcctataagtaccattatccatcaatgtatcaagacttctcaaagggacggccaaccgaagttgattatattaatggctatattgctaagattgggcgggaacatgactacgtttgtcgcgtgcatgagtttgtgactcacgaagtccatttagcagaaatgatgcggcaataccggcacccggaaatccccgttgctgaaaaataagattattaatgaaaaagttctgagtattttcagaactttttttgtgggcggaaaaacttaatttagtaaggttgaaatcggtttctttaacattggtctatacacttagatgaccttgtaaaattgcaatgaaaacatgttgtgataggatttataacgtgcttaaaaagagaatgaggagaaattggtatgaagacatattttcagaaaatcggtcagtcattgatgctaccgattgcaacgttgcccgcagcagcgattttggttgggattgggaattacctgccaaaacagtggctgtttgcaaattacttgattcagggtggtaacgttgtcctgaataacttagccttgctgtttgcagtcggcttagctatcgggatgtcagtcaataaggacggcgcggcagctattgctggtttgatcgcgtttgaagttccggtgatggttttaaaaccagcgacattagcgacgatgctgaatgttaaagtgagtcagatcaatccagcatttagcgcgttagataacaatgtgctgattggaatcggtgctggactgattgcggctgcgctctataatcggttccacgaagtaaaattaccaatggcgctctcattctttagtggtaaacgcctagtgccaattatggctgcttttgtgatgctgattgtgacggcggtattgtaccttgtttggccgtttgtctacgatgccatcgtcctctttgcaacggggatttcaaaattaggtttcgtgggggctggtctatatggctttttcaatcgtttattgattccgactggtttgcaccacgccttaaattccgtattctggtataacgttgcgggtatcaatgatattggcaatttctgggccagccatggtgttaaaggaatcacagggatgtatgaagctggattcttcccaattatgatgtttggcttgccagctggtgcgtatgcaatttatcgtaatgcacgaccggaacgaaaaaaagaagtgggttcattgatgttagctggtgcgtttgcgtcgttctttacgggggtgaccgaaccgcttgaattttcattcatgttcgtggcatggccgctctacttattacatgccgtttttatgggactatcattaggattcgccgcgttaatgcactggaccgccagcttttcgtttagtggcgggttagtcgattatttattgagttttcggatgccgttagccaaccaaccctatatgttactggttcaagggctggtgatggccgtcatttattactttggttttgactttgcaatcaaacggtttaatttgaagacgcctggtcgtgaagttgtgtctgcagatgtcgatggggtgggtgcacctgctagtccagcggtggccgttgcagcaacggatgataagtatatgcgccaagcaaagcaaatttatgcggctattggtggtcatgacaatattagtgtgatcaacaattgtacgacgcggctgcggttacaacttaagaatacggaaaaagtcgatcagccggccgtaatggctgctggcgtgcctggtttgaacgtactggatattcataacattcacattgtgattggcacggaagtccagttcgtcgcggaggctttacaaaaattattttctggtcaggtggcgacgaccccggcatctgatgctgaatcaaaggccccggttgaaccgcaaactgctactgtaacggaagcgccggtgacaacgattttgcgggcaccggcaacgggacaattaatgccgattagtgcggttgcggatgagacgtttgctggtaaactcttaggtgatggttacgctgttgaacccgaagatggtgaagtcgttgctccggttagtgggacagtgacaagtgtctttccgaccaaacacgctatcggtttgaagacgacgagtggtttagaagtcttattacacatggggatcaataccgtggaaatgaatggtacgccgttcaagttacacgtggcaacgggtgacgaaattgcggccggtactgcggtagcgacggttgacttggctgctatcaagtcagccggtaaagcgacaaccatgatggtcgttatcaccaatatggattacgttaacaaactaacccttaatccaactggtcatgtgactagcggtgatttgattggcgcagctgaataagttacgcgctgtcgacgttgggtttattgaaaaagtttcgtctaaatcttttcgatttaggcggaactttttttgtcgcattggttatcgaggcaacggatgacagcaaatgaacagcttgatgcggggacagtgcgtttgattgcttcccgctgactcccacgatatactattggcattataggggggcggtaacatgattgacgaagtattagtattgaactcaacgccaacggggattttacagaattcagtttcaggaagcatggtgattgacgcggcacttgatgcacgactagtcaagcgactaatgcaggcgctaactcaatcgatgcttaaggtcagggttgcaaccgcggacgacttaccggtgaccgaccaccaattgctggtcgtcagtcgaccagtggcagccgtgttggacttacaagctagtgcgcgagttctgatttatccagaagcaacgggactgacagccgctggaatgacacagctagcagtgcagattgatcaacgattgactaaaatatccagataacgatcaaaaaacgcccagggcagttgttcgcaagttactgaacagttgccctgggcgtttttaatgattagtctttgtggtgttttttaatgatagttactaatttcaatcaagttgttatcaggatcacgaacatacagtgacgtcaactttccgtgggcaccagttctttcaaccggcccggcaatcacatccacgaaataactctttaagtgatgctggatatcatcaatattatctttcgcaatcaagcaaagatctgcactgccgggtgtcggcttagccgcaatgggttggtgtggctggtcagtggtctgaaagttaattttttgtttacccactaagacagcttggcggtcaccatcgaaggtcacaatgggaaggtcaaatacttcatggtaaaaccgtaatgaccgtgcaatgtcagtaacggttagggtcaaatgatcgatatcgcgaatattcacaagctcaaatcccttcaaaaataattcattattaaacgtgtcgtactcatcagatttggcttgaaccatgattaaaatgtaccagttagattgctgttcgtcagccgttgcgcgtcctatgccgacctccggggctgggtgacaattgctggaacgcagccgacgtcgatttgagctaacgcataacccgcgtcatctcaaatacgagtcttattctaagccggaagaaagacacttccgactaagaataatttggctactgagcattgtcacccagcccctccagtctcaagcctgtgcggggccacgggttgaagccgagcattgtctagccaacggattaatgcggtttgggtattagtccgttggcgtagcaagcacaggctttagtggcaccgaacacgtttttggaacccgctcgaatggcagattaacggccacttaacttggtaaaatttgtcgctgactattttgacaccggaaccttaaacgaaacgtcagggttccattaaccactttgtcgagacgttcgattattactatgccacttgaggaatagtgagctcccacaatatcactttcagactgacaggtaattaacaaaattaccgtttatgaggaacaatgataagtccatcaaaggttgggtacatcttcgtcagccattcgaatactgtcccgactggaaggcgtttcggccaatgctcagcggtgaaattccacttagcaagcgtccttggcttggttagtggaagaccagtatttaagacgtggtctgcggcttaaatctgtgtccaccgcgttccagcaattggcagaaatgcctggaagtcggtgtaggacgtcgctaactaagcaagtttacgctaaatagatctttttccagcgggcctaagctggctgcttttgaacttacccaactggtatgttttaatcatgattcatgccaataataatgagtataagacggtgttattcagtataccacgattgataatgggacggatgtgaccgtatttgggaagcaactcaaaaaataacaactgtaaccgttcacaccggacgcgacttttgacaatgcttgcttttcatagtaatgtaggtgttactataagaaggagggctattcgtgataacaattcgaccagccgatcaagacgacgcgggccagatagcaccgctaattaatatgatttttgatgaaatgcaacttgaggaactagacgacattcctgaacctgacttagagcaggccattactgccgcttaccggacacctgattatttgtctggtaaggcaacgacagtagtggccgaggccgatggtcaagtggtcggggtagcgtttggttatcctgacaaaaatgaggacgcggtggacgacgtgttagcacgagttactgcgaataatgatgcgtttggttcagcatttgaagctgaagctgaaagttatgagcacgaatggtacctggattcgattgcggtcgacccgaattatcagggtcatgggattggcgggaagttactcgccgccctgccaagatacgcgcgacaagctggtcaaaagcggattggtttgaacgttgacatggctaatttaggagctaagaagctctatgaccgttatcattacgaatcggtaggaattaagcctatcggtgatcggatgtacttccatatgcaatatgaactagataaagacttggtgctagcttagtatcagggctatcgcaacgggcctcgtgatatgacggggcccgttttaatacgggtcaaaatgaaagtgtaggttgaaaacaacatggctttactagaagtaacggatttatcgcaaagctttgcggaccgtaaattatatgacgatgcgaattttacgttggaacgagcggatcatatgggtatcgttggtcaaaatggggcgggtaagagtaccctaattaagattttaactggccagatcttaccattatctggtcagatcaagtggcagcgcaacgttcgaactggctatctggatcaatatgccgatattccagccggcatgacgctatacgcctttttgaaaacagcttttcaacgcttgtatgatttagatgcgcagatgcaacaactttatgcggattatgctgaaaaggtggatgaccagttattggaacgtgcaggtcggattcaggagaccttggaagccaataatttttatgatattgagacagaaatggaacgggtaattaccggactaggattagatgaaattggtcgggatcacgtcatcagtgagatgtctggtggtcaacggtcgaagatcatcttggctaaactattgctggaaaacccggatgtgattattcttgatgaaccgacgaactacctcgatacggcgcatatcagttggttggaagattatttgaacggctttgaaggggccgttatggtgatctctcatgactatgatttcttgcaacaggtcacaaactgtatttgtgacgtggcattcggtaaaattattaagtaccggggcgattttaaagcggctatgcggcaaaaagaagcacgtaaggaagcccaactgaaggcgtttgaaaagcaacaagttgtgattgaaaaagccgaaaagttcattcgcaagaacaaggccggttcaaagtcaacgatggcgaagtcacgggaaaagatgctatcgcatttggatcgggttgatccaccgagtgaaaatgaacacgccaagtttgcctttccataccttgatacgggttctcaaaatgcattgagtgtgacgaagctgtctgttgggtacggaaagccgttgttggaacccgtgacttttacgatgaccaacggtgaaaaattagcgtttaagggctttaatggggttggtaaatcaactttgatcaagtcaattttaggtgtaattccagcgttaagtggtaagtcagatttttcgccatctgctaaaatcaattatttcaatcaagatttggaatgggataacccacagttgacaccgttacagacgattcaaaatgaataccctacgatgttaccgaagacaattcggactaagttggctaagtgtgggattaatgcggcgaatgcgatgaagcccatgcacttactcagtgggggcgaacagactaaggtcaaattagccttgcttgaattggttccaagtaacttcttaattatggacgaaccaacgaaccatttggacgatgaaactaaagaaggcctcaagcgtgcattgcaggctttccaaggtaatctaatcttggttagtcatgagagcagttttgtgaatggctgggtcgacaaggaattgaacgtcgagaaactcagtttgaaagaacgacaaggctaattcttatcctttttaatagcagtccatgcttgggcttgtctgtggacagacattcaagcatggactgtttttggatgtcctgattaggagaaaattatttttagctgactagttaatttgaaaatggactgctggcgattcagtaattattggaccgtcagcgcgccattgtccccatcggtaatcgctaaacccaaaaaggccgttaatttgtaaatcgggaacgaatttacaaattaacggccttttgggaacaattattaatccgttagtaattgactttcaaccgtggtctggtcgcgaccggcctgcttggactgatagaggtagtcgtcaacgcggacgaaccaatcagtgaaagtctggtcggttggttgcaattctgaaataccaattgaaacggtcacgttcaacgtttgagcgttaaatttgattggcactgttttcagtttacgctgaatcgtacgcattatttgaccagtttcaagcgctgagatgccacgaaaaatgatgacgaattcttcaccgccatagcggaagatctgaccgtgagtgctgcgctgattaagttcaagttcaacaaaatgcgccacgtgtcggagtacggcgtcgccagccagatggccgtactgatcgttaaaggctttaaagtggtcaatatcgaacatgaccatggtgacgggccccatttgatggtgctgatacgcggcaaacacttcacgcgcatgcgtgtcaaagctggcgcggttacgaataccggttaattcatcgtaattgacttgttgatcaaaggtgagcacttcattgaaaaacttttggacgcgattgactgctaaacgaatcaaccacatgtaaaggacaaaggctagaatgatgacgagtgtatggctcaatttgaacggatgaactgaccaaataacgccccaccaagtgccactatatagtatttggaacaggagatacttccattgaatagcgtgtaattcttgatagttatgagtaatatagacgactgtactaatcaagataatggccatggccagaaaaactggcaggtactgcgtgctgtggcccaaccagatggcctgaccataaatgaacaatggcattaacaggttaataatttcaacggccaggttgcgcatggtgttaaggctgaacagaagaatcgttaattgaaccgttgcgtaggtccaactgataatgctacctgaattcagcgtaatgaatatttgtcgtaataggatcatactaatgaggacacttaaagcctcggcaccatgggccacaatagtccaatatcgattttgacgacgatggacctgttgctctaggaggtaggtcagaatggtcattagggtgatcaggccaattgtaatgagaacgacaattagcattttgatattaaaaagatctcggcctaagctcgatagcgtaagtagatgtaacacagtgcgcccccataattgttgcgtttaattaatttgtcctttaatcataacacgttacgcaggtaactgttaacagcagtttgcaataatttaaaaatcatcaaacagtctttactgaaaaataacctagtctttacataaatatgatgatgatttaggcctcaatacggcatacttaccatgtaaggttagatagcaaacgcaataaaaaggagtttgtaaaatgctgcatggaacgttctatggtgtgatcttgattagtttcttgattggtatcggcgtgcagtggtattttcgtgaatactttcaattattagtgttcggccatagtgttgagattttatttatgatggtattaggttggtaccagttcggcatgctcgttttactaccgctgttagttttatggggaattggacttggtgcaatttatgtgatgaaccgattcgcgtaattagtttgtgtcgtggaggtgcccaatgagacgatggtttgtgagttacacgctaggaatgattgttggtgcggtgttatttttgtgtagtttagttgccattcattggttgggaccacaattatgggtgggcgtggctttaggtgggagtctattggtaggctgtaatattggcttagaagttctcaagcgtcattatcaagtgacgacaccacaagcgatttttaggttattgaattggtcctgaggtgcccataactgatagttgggtttgatttgaagcgggctaccgatctctgacattgcaattggaattcattaaataggcgcaccgagaaactaacatggtttctcggtgcgcctattaagctacagtttccctgtgcatgcggattaatgattaattttagacatgtcgtgatcatcgggcaacgtgaggccacggttagggacacttgttgaaaagacgatctgagtactcgtttttccaaatgtttgtaattggttgacaaactcgtctaatgcctgcgttgattcgaaaatcactttcaaaatttgagagtattcacccgtgacacagtcacattccagaatattaggaatgccggcaacaaatgggtaaaagcgctccttttgcgttggttcaagttggagttgaatataggcttttatgtggtaattgagcttttcaaagttaagatttgcttgatagtcacgaatgatgccactctttttcagacgagtgatgcgagcggaaattgcgggcgaagaaatgaagcattgatcggcgagcgcttttaaggagattcgcgcgtcggcctgcaaggcgttcaaaatcttcaaatcggttttatccatcgttaaaacgcctcctaagtaattattagtatcatagcatactttcacagtgatttttaatatttagtgtaaagtttctactgaaaggatagcttcttaacgtgccgaggtgccacggcggtgtggggcgatcgattaaagttaaaatcacttcaaggtttgaccaggaagccagaagtggttccggagatatggtaaactgaaaaaatgaggtgactagaatgcaatcaacacggatcattgcggccgttgcgaacgtgtggcggcagccaaacaatacgtccatcgatactccggcactagcaaatgtcggcttacaaccatggttggcgcagttatcagatgaagatactgtggctttggaacgcgacaatcgcatcgtgacgcaggcgttatttaacgacgtctttttagtcgaacagtttgtcaatggctgggcctatggttacgttgttaatcaggccgactcccggcatccacaggggtatccaggatgggtatgggcggcgcaattgtcgaccgtcccattgccggttcaaactgggccgatgattacgatacggcgtggttttacgccgttactatgcttagatggccgtacgttcttaaatcttagccttggaacggaactacccgttattagtagcaaagatcatcgttattatacggtccagaccccactcggaacgggcaaaattgcaaaacgtgcgacgcagtttgcatttagaaccgcgcgcttgacaccgggagcgacactcgttcgcctcggtgaagaattcttggatttacgctacctatggggtggcatcagtgcttatggtttcgattgttctggattcgtctataccttgcatcgcagtctaggtattcgcttaccgcgcgatgctcaggatcagatcaagcaaggagtggcggtcgacatagcaaatgcccagcttggggatctgtgtttctttgctcataatcatgggaacggtgcggtacaccacgttgccctatatgccggtgatggctggctattacatgcacccacgcctggcaaatacgtgacatacttgcagttagcaagcacttatttacaagatgagttggtcgctgtcaaacgaaattggtaatgtgagttcaattgacttagatttaattaaagtagaatatttcaaaatattaatggggcggataaagtgaaacaaattaaatggtggctgttggcagtcttattagtcgttggcttaaccggttgtggttctcaaaccactaagaaacaagcaacgcaacaggcggcaagtactaaaaaaatatcgccgtatgtgaatcaacagacccccacattttacgtccacgggtttcaggggagtgcgaagtcaacgaataccctgattgcgcatgctgaaaagactgctcatgctcacaaagttttggtggcaacggtcagtaccagtggtcaagtgacgttgacgggtaaatggcgtggtcgggtgcgtaacccgataattcaagtcgtgttcaagaacaatctggcccagtatgaccaacagagtgcttggctggctaaggtgattaccacggttcaacaacagcacgcgtttaaacattataatatcgtcgcccattctgcgggctgtgtcgctagcgttaatatgctgatgacgcaacaaacgacgacttttccgaagatcagtaagttagtaacgatcgctggcccgtttgatggggtggtcggggaagatgatgttgctaatcagaactcgtttctgacttctgggcaaccgaaatatttgcatgcagcctatgaattattggcagccaagcggaacaattttcctaaaaatgtacaactattgaatatcgtgggaaccttgaacgatggtagtcattcggacagcttggtcaccaacgtgtcggcccgttccatcaagtatttattgcgtgggcgggatgtcgattacaccgaaaaagacttttatggggcccatgcgcagcacagccagttacatgaaaatactaaggtagcactggcagttgaccgctttttatggcatcgatgatatgactggggctctgctaatcagtagttggtttgggattgtgagtcagtcacgttacgcaattagaatcaaaatcaaacaagctcatccggccttagtcaggtcagatgagcttgtttgatgatcgtcatcctgaagtcagcgggttggtctgggctagagaaagaatagaatataagccgttcgaataaggtggtacaacgcatatagggtaattaaataaacaactgagataccgccatatacggcatatttataattgcgcatgtaaaaacctcccttataatattacctttagtgtaaatcggaatctatttttacacaatgcaaacgccttcattattaggactaaatttaaattaagtcaaagaaagagcattctgttagcgataacttcaaaaatatgataaagttagttgttagttcggtggacttcacgctgccggattaaatttacctcagattttggataaattaatttttagtatcatgtacttgccccagtattgagtattagaattatttacagatttcctgagcattaggaaaggatgtaattcaatgcgcgttaccattaatcgcggtcaagaggtctacactgatattcccttaatgaccgcccgacatcgctatatcaaagcggatgtctgggaaataaaaaaagcaattattgaaaagtcagccattaacgggtggacggttcaagcgctacaagcaatgaattaaaaaataaacaacggccacggcatttgccagtggccgtttttgtaggaggacgatttgaatggcgcatgaagtcagttatcggccattaatcagtattacgaacgtaatctggagtttcgatgcagtgaccaagcaactgctggtcctgcttattcagcgtgatcacgctccttttgagaatacctggggattaccgacgacgtatttgagaacggatgagagtgcggatgaagccgcattgcgattagttcgtgagaagttgggcgtccagcttgcccaattccatacagaacagttagggacgtttaccgcggtcgatcgcgtgccgggtgaacgctcactggcgttgacgtatatggtttatttgccagtcaagccggaactagttccggggtatggtgcgcgcgatgtcaagtggtttgccattacgccgcgggtggatcgtgatgatctggtcgctgatggtttggcatttgctggtgttcccgattcgcagacggagcgggagttttatcaacgaatcgccaagcagttgttaaccgccgatcatggcctgatcttaagaaacgccctacaacgtgtgcgcaatcgcctggactatgctcctacgatcttattagtgttaggtgagcagttcacactcaaacaggcgcgccagctgtatgcgattttgtggcggcagccagtggcaaccatcgacaattcaaactttcgtaaaacccacgttcatttatttacagaggtggggacagcccgacctggctcttctggacgccccgctaaggtataccggctaaagtagttcatttgacacgtccaagtcggtatgctacttttatagcaccataaaggtaaaaaatacctaaattagtggaaggctaattaggaaatttgggagagtattggaatggtcgaaagtaaaagaaatagtgctaagctattatgggtcatcgggacggcctggctttttgatgcgttagacgtggccctgctatcatttgtgatgccggttattaaagaaagttggcagctaactgcaggacagttgggagcagtcagtgcgatcaccacgcttggcatgatgattggggccttggtatgcggctatttagcagataaattggggcgtaagccggtccttattgggacgctactgcttttttcgcttggtaatttgttattgacgattaccccgaacgtcgagtggttcttagtcgttcggttgttgactggcattggtctggggggtgaactaccggttgctgcgacaatgattgctaatcattatacgggaacacagcgctcacgcatgctagtcctggtagatagtttttgggcgtttggctggattgcagcatcgttattggcctttttagtgatgccacacattggttggcggatgacggtcttaatcaccgccttaatggggttgtatacgttgctgttacgccgacacttacctgcagaacaggaggctaatcggccacaaaaagttgattttagacaggcattgcggcaagtgtggtccgctaaatatcgacgagctacgatttgcctcagcattctatggtttgtgattatgtttgcctattacggtatgtttttatggcttccaagcgttttggtgttgcgcggattttcattagtacatgggtttggctatacgatgttgatgagcttggcgcaacttcccggctattatctagctgcgtggttgatcggcgtcgtcaagcgtaaggcggtattggcaacttatctgattgggacggtcgtcagtgccgcagcttttgggacggccaataatccaacgatgattctgattagtggtgcatggttgtcgttctttacgctaggggcgtggggaattatgattgctttcacaccggggcaatttgcgcccgcggtacggggaattggtatgggcgttgcccagtcaattggtcgcattggcgcaaccatcggcccatttttagttggtgcgctgatggcaattggatttggcattccggcaatttttatggtgttcgtggccgtactcttactcggtgttggggtattgctattcgggttaccgaatcaagagacggatgattaagtatcggtggcagatataaattaaatcgtaagttaaaattacttatatggaatggactagtgatgtgggcgctgttgctgaatttgaattgaaatgattcaataatattttttgtgaaagttaaacgagctcagtgatgacgcggctttgagggtgtcattcgttgcgaagccaaagcgaaactcctatgattacactgaggagttgaaaaaaatggcaaaggcaaaagcacgtacgacccaaccgaatgaacgattaagtgcccaactagcacttgccagcatggcaattgagattcgaagcgatgttgtgttgaccaggttagttgcgcgggctcgtcgccggcttaatcgtagtggtgacagtattgctatcgcgcaccaaatcgctgttgatctaggttattatttagtgtgtcatcaatacaaaatgccccgagctgcttatgatttgttagcagttgcgtatgaagtaagtgttgagacgcccacacgagcgactattattcagttaccgtcacgaaaaaaatagactaggactatcaattgattcacacttatattagaatataatgataaatagatgtgcaaaattggaggggattgaatgggaaggtctgaacaattaaaaaagctcgtcttggcagggttatttgccgccattatttttattggtatcagtgtattacgaattccgttgcccgcgattgttgggcggccatttattcattttggtaatattttgacagtgctcgcagtgatgttgcttggttttggctatggtgctacggctggtgcagtggggcttggcttgtttgatattctgaatgggtatgccgcaacttcgtggttaacaattattgaagcaattattctggccgcgatggtcaacctgagtttcaagtcaatcggctatcgcgaagatcgtattggccggctttactgggtatcgttagtcgcagggctcacaaaaatcgtcacttcgtggtgtacaggcgtgattgaagccttaatggtggggacaacgctcaaggtcgccatgattgggtccttcacgagtttattagcagcgaccattaatgcggtggcatgtgtcatcattgtgccgttattgtatcggatcttagtacaggttgggtttaaccgccagcgggtcggtacggtctaaatggccgcatgctaacgcagctggattagtgccgtgagcacttattattttaacagactggttgcaatccactttaacaccgttggctgtggcgtttataattattggacagattttggttgatcaggttaaccatggttgtattatcggtaaaaaaagccctttccaatttggaaaagggctttttactgaagtagcacgctaatcaaaataggacaaaaaaagctatcccgttaggatagctttaatgaatattgatataacaagtgttctggagcttattacatcactttgaaactcaataatggagatggcgagagtcgaactcgcgtccaagcatattgcccctcggatatctacgctcatattcatactatttaaatttcatcattgcaaacgccgtatgacagggcacccagcaatgactaacctgattagtctcttctcgcaactccaggtggaagctttgagcgtaagtccactaaatttaggacccagatccagaacatggacgatcctgggaggatctacgttaagcgcttattaggcagctaaagcgtaagaattgttattattttttgcagttataatttaaactgagcgtttttacgtagacgcaacctacgaagcgcaatccgaactcaaactatacctgtcgaatccagaacatccccaaattcaacaatcctagtttagcacagctcaactgttctgccaactaatctgtctactggtcatgacaatcattacagcagtttaagatgaagagtgtgctcggcggcgccgcaaaaagtgcaacattttatgtgtgttcagtgaaagtgccatgactgccaagataatcagtaagccgccgataaaatcgaagctagtgagttgaacgtttagaaaagtaatcgagaaaaccgtcgcggctaagggctcgaaggcgtccatcaaactggccgttgtcggtagaatatcgcttaaactacgcgcaaacatcaggaagggggccaccgttcctaagagaataatgacgattaacaagcctaattggggccaggtaatcgtcaggtggacacgccacatgggttgtaacaaggttagaaacagacccgcaatcagtaacccccagccagtgacggttaatgcgccatactttggtaaaatggttcgcggaatcaaggtgttcgtggcgaccccgatggcggataagccgccccagaacaagatgacgggtgaaattgctagactgtttaagtgaccgtgtgtcacgatcaatagtgtcccgataaaggccatgatcataccaatcagttcgatacgactgggtgtcacgtgcttaaataagaagtaatagatgctgataatgaatgggccaagaaattggataatcgtggcaatcggggcattaccaacgcgaaccgcttcgaaatagcaaagttgaaccggaatcagccccagcaaaccgtaactcaccgctgtccaagcggcatggcggtgatgccagattttaaagggatgtttaccagccaccatcccccagacgagtaaaatcaagcctgcactgatcatgcggacctgcgttagccacattgcggttagatgcggattattgatgaagagggtactcgcagccacccctgagataccccacagaatacaggcactactagcgagtaagacgccccgtaaatgattttgttgtgtcaaattacgactcctttctgaaaataataagcaattttcattatagcaaaggtgcgtctgggaacctatgtttatgaggaatctcttattattctcatgggttacttcatcaaaagtaacgggtgcgtttcagaagagctcatgctatgatatgaacaatcaaacgcgaataatgatgcgtctaacggaggctataaagatgaaagcaattattaccgttgtgggacaggaccaagtgggaattgtcgcaaaagtagcgaacgagttagcacgtttaaaaatcaatattgtcgatatttcgcaaaccttgatggatcataattttaccatgatgctatcggcggaatgggatgaccagcaattaagttttgcggcggccaaagaggcgttagaatcgctcggtgaggcatcagagttaacgattcgaattcaacggcaagcggtttttgacgcaattcagaagttataggaggcggccatggaaagtcgttcaattttagaaacaattcagatggtggccgaggaaaatcttgatattcgtacaatcacaatgggcatttcgctctttgattgtgttgatagtgatggtgagcgggcccggcaaaaaatctatgataagatcacgactagcgcgaaggacctggtcaaagtggccgctcaaattcaagaagagtacggtattcctatcatcaataagcgaattgcggtaacgccgattgcattgattgcggctgcgagtcaggatcaagactatgtcgcgtacgcagtaaccatggaacgggcagctcaagcgctaggtgtcgatctcattggtggtttctccgccctggttcagaaggggtatcagagtggggaccgcaaactgattgcatcgattcccgccgcgttagctgcaactagccgtgtttgcagttcggtaaatgtcgggtcgacacgggctggaatcaacttggacgcggtcggtgaaatgggtcgtattataaagcagattgcggctgacgatccggtcaattgcatgagtttagtggtatttgccaatgcggtcgacgataatccgttcatggcgggcgcttttcacggtgttggtgaagctgatcgagttattaacgttgggatcagtggccctggtgtcgtaaaacgagccttagaagaagttcgcggtcagtcgatcgacattgtgtcggaacaaattaagaagacggcgtttaaagtgacacggatggggcaatttgttgggtccatcgcgtcagaacggttgcacgtcccatttgggattgttgatctatcactggcaccaacgcctaacgaaggcgattcggttgctgagatcctggaagaaatcgggttggaaagtgtcggtgcgccgggaacaacggcggcgttggccttactgaatgatgccgtgaagaagggtggcgtgatggcctgcgaacatgtcggtggactgtcgggtgcctttattccggtttctgaagatgctgagatgattcgggcggtcagtgctggtcgtttgaatattgaaaaacttgaagcgatgacagcagtgtgttcagttggtctggatatgattgcagtacctggtgatactagtgccgcgactatcagtgggatgattgccgatgaagctgcgattgggatgatcaacaacaaaacaacggcggtgcgcgtcataccagctaccggcaaaggtgttggtgatgcggttgaatttgggggcttgttcggtcaagcaccagttatgccggtcaacaccaatcaaccaacgacgttcattaagcgtgggggtcatattccggcaccaatccactcctttaagaattaggcacagtggacgttgtgaaggggcgaaccggcagtcatcctgaacttaaatggtgacttcacgctcgcaactcgtgaaatgtaactgaatgatgcacgatttcctggtcggtatgaacggcagaaaatcgtgctttttatgtcagtgagcatgactctggtatgatgtgtgactgatgtgccaagattattaagtgtccctcaatgatgggatgacacagttatttcacaaatcgtgcacgctttgttattaatttgttgttatactaatcttctttattaatccccttattaggtatgaataccgctaagttagtattttttgctttgaaatagttaggagatatatcactagcacccttaatcaaaggatataactcatcagtttcaacccaaacctttcgggcaggaccaatatcggtacgcccagcttccggtctagtccttacctgtgccaagctactagccttattaacagctaacacctctacgaagtatataccgttaatgtctgcagtaattcctttatatccacgataattactagtccctctcaagacttgatatgattgtaatttttcttttgaaccatatacccatggtgatctttgatcaaatataggctgcgcaaactcttccgtaacaatgcgcttctttaaaatttcggatagttttgtatttttgtttatcgattttttaccatcaacagatttccattcaacatagggtaccgggtatttaatcgtatttaacgtttttctcagtcctaatagcatggtcttattcaccgcatcaggaaaaggttttaatgcttttaaatcgtcaacaaacatgggtgccaaagtatagtcccctaattgaaacattctgaaaccggaagacgaatcattttgaagatgattttgtggtagtaaaaacaacaatataccatcctcgtttaaccatttatctgctaccgtataagttataagggccgatatatctagctcatttccaccatgacgcttgtgttctgaaaaaatattatattggatcgccgttggtttcacacgctcacgatataattccggtaattctgaccagcgaacccacggcggattacctactaccatatcaaaagtaccagtttcagcagaccaaaagaaattttttatgatttgaaaccaaattccattccagttttgctggtgcaacttcaaaacattattgtaagtttcctcaatcataacaaacgaatcatcatttttaagaaagggcaatgacttaaacagactctccgaaacatctgaaaactctcggccatcatttacaaacatatctagtcgttcaaacaactgcttaatacgtgatctatgtctagcaatataacccggtaattttaccgttaaattcgcagtactagatccaatctgatatgtgaaaatatcattttcaccttcagtcggcgcataaactgcatcagacagtagaataggaatctcaatactctctcctggattctctcttattaaatcaataattgtaaataagtaatttaccctgcctgtttgcacagccaaaggattcaaatcaaatccataaacttcttttaaaatatttttcaattgtgttttatgatcaatgccttttttatcccattcttttctttttatattaataacctgaattaaaaaagaacctgatccagctgttggatccaaaatcttactggacattatttttgatttatcaacttttgatagcgtatactctattaaccaatccggagtatagaactctcccaatgattttcttaaagaatctggaactaagccctcgtaaaagcctttcaatacatctccagattccatagcatttttttgatcaaggttgtacaaagttaattctgctgccattcgttttaataaaacagccaagtcatcattttttgcatagcttaacgatgtgtaccaactaaataatacttcacttacaaaatcgtttaattgcgcttccctaaaatattggctaagctcaatttctttacgtaaactatcaattactttatcatcactcaaagaaacgatatgctccgcataatggctaaaactagagatattgaacgtagatactaactcggcagctaataacttcactaataacgaattatacgtattgatagtgaacagtgattgagacattttcgcatcatccggaaatggaagattcttcaaataacttttcgccttccacatagccggttctgatacttgtccatataattgtttccattcttcataaaataattctgttcttgatccactaatgctcagctctttaatcaaaatattataaagctcacttagaatagcttttccaattggcgacttaggaccaaaatctataattaaattttgggcacttaatcctctccgaaattcggtgttaatagcctctataaccaaattaaagctgtctatgtttgttcgcaataaatttccagtctccgtactaccgtcatcatttactttaacaaaagcaatatttactccatcgataacaattccaataaactcatgtggtaataaatttctgcgttcattggcccgtaagacatatttttttattcgattatcaacagcctcaataaacttttttgattttttgctattatgaaataatcctttattcttgaattcaataaacacattattgtatgacatatcacgtttgtcatgctcttgttcaaatattttacctgttgcacctgacagcgcagcaccccaagccatgcgcacgtcttcctcttcagttgcaacatttaatttcatcatcatttcgtcaaatatctctttgtatttttgcattagcatcctcccagacagatttgttagcttattaattaaaagggattgtaccaaattatatactaacactaacaaagaacgtacgttcgtattaacactcacgagcttgttatttctagaattttcattaattaaaattcgacttctacattttatagttatttaccgcaattagcaaaaaaagataagtcagtgaccattactggcctatcttttcattactactactcagcaatcaccttcaatactttcctagcctcaacatccacttgctccggcaataggccaatatagtacttttgagtaatcatcacactggcatgtcccaaatacttcgacacatacacaattgaaatatccttactagttaccatgagactagccaacgtgtgtcttagtgtatgagtactaaactttggcggaagacctaacctcttctgtaattgatgataggtctcattaatatttttcgaatttggcaatatcccatacttatttaacagaagaaaatgatctggatttttaataccgcttttaaatagaacctgccgatggtagtgaatccaacggtttaaaacattcaataccgcattcggtaaaggaatagttctttcagcatggctagtcttagttccttttaaaactagatgttggctgtcccaagactcatctacacgtaaagtacggtgtacaaaatcaatgtcttcgtattttaaggctaaacattcgccaacccgtaaacctgattgcgaaataatcattaatacgaggcgattcacatctgccaaaaagtaatgatagcttagcagaaagtctcgaatcttcttaaaactactaattggcataaacttcttatcatctggcttagttcggcttggatcagcaatgatttgtagcgttccatcagccggattacgagctagcacgccatcgctaacggcatcccgcatacaagcccgaatatgttgcaaatccttacggcccgtttcatgacttaatcccagctgatttaaaaaagcctgaatttggttacgagttacgtcttccatcttcactcgttcaaagaatctctcgtaatgactgtaactgattagataggtctccaaagtatttgggctcacaactggtcgcttatatagatcgacccaatgcaagtaataatctaagaagcgccagttagccatttcaaacgtagttccacggtcataatcaatttccatttggtgtaaccactgtttagcctgagaaatttcattaaaggttttagtcttacgtcgtcgacttccacccgagcccagactcaactcagctttatattttcgtcctttcaatggatttaaatagattcgactcatgctggggcctccgtttcattaggaaccacttttaattctggcttcacaggtaacttctctggtttagttgtatcttcatcaatagtcgttactggaccgaactcccacggcgcatctctcaacgctaatggatgaacctttttaccaccatcatttagtagccaaaacagctttttctgttgtttttcagctttacattgatcgatataatcagctaacctaaccgttgctacttcatactttgtggataacgagccagtagcaaggatcactttatccacatgtttagtcgcagccattaattcttcaatcccatccggtgccgaagcttcgtctaaacgcttattgcatggccacttaacttgcgcattaaataggtttgcaatcacaacaccaccaaaagttccacgatccacaatcgcatttcgaatcaagataccagtcaaactatccttcattacagaaccggtcactgggtaattagctaataccataactagtggttcatccttgttccagacccacttcttccagtaggtgaactcacccttgatcttttgttccacagtaacgtttagtttctccatatgcttacggttcacttcggccattatttaatccctccaacttcatctaataacttagtgactgcaacgactgttacttccaaagcaacttttatccacatgttcattacttttcctccgatttttttgcacaaaaaataccaaacagcttgtaaactgtttggtattacatttgaatattattatttaagctatttccaactaccagtttctccttcaaattgctcagcttagtattgagactctttgcatcattcgtaacttttgtcccggtagtcactgttgtcacagctttttgaacctcaccatctttaagctcagattgtgtatctaaataggcctgagtctggtcacgataagccttagccttgctgtcctttggtttttgcgtcaatgcattatcaaaataagttagtgccttatcaaacctattttcagcaactgcattaagccctttgctgataaagctattgtatcctgaattcttattatcagctgactgttggttaccacatgctgcctaccaactcatccaattgccgatagattggctgaagcgcttcaatatccattggttctaccattccactaccccctattaccgctagaagaatcattgagacaaaatgtcccaagcccataaagacttttttgcttcaaatcaactactgcatagcctgaccaatcttcaaaaataaacatgtgcacgataacccactcaggtaacgtttctggctcaatgcctgggtaatcaatttcatccttggatagtcggatactctcaatcccgacttgatcaggtgtcactggttcgccaacattgtcgctaaacaactcacaaatccgacccagaatttcatcaaaagacaccattgctttgacacccttccttccgcttttgtacatcatcaccaattactatccgaatacaaaacattatcatcacctcacgaatacataaaaatagagatagcgttcggcaacaattgccattacactatctcctcaagataataatatatatttataaatccggttaaatcgactgcataaatctacagaaacagtatttacacccccatgcccccctaatccccctaaaacagcaaaaaaggcacgccctcaatggacgtacctcctatttataaagcgattgtatttaaagcaaccgcatcttctttttgatgttcgccaggaagcacccgtaaataataccgctgtgttatagccgggttactatgaccaagtaaccgagaaacatatgttacatcaagttcaggttgtgccaccaataatgatgctactgtatggcgcaacgtgtgcggactatggatggcctcgattcctaaatgccgttgtaatgtgtggaaggccgaattgatgctactagccttgggaagtcccttcccattgcttgcaaaaataaacccggtaccccgttttacattatcatgccataaacgtagcaggcgcaccacatcatcaaccaatgggatggtccgaacagcattgaccgtcttggtagcctttattttgcgagcagccgaatcataactcctctggattcttagctgatgtcgttcgggatcaacgtcctcccatttgagaccgatcacttcacccacccgagcaccagttgcactgataattgccaaaatcaggtaattagtgtccttaggtccgtaagaacgtttaaacaaatagcttcgtattttaagaaaatcatcacccgacaagtacttgttattgtcgttccgtgaccgttcctcattacctgtgaccacaacaccattcatcaaatttcgtcgaatcaatccatcgtactgagcattcgctaagcacgcttttacttgaatagcatgcttacggcaagtttccttcgaataacaataacctagctggttaaagatgctttgcaacaaggttctattaagttgagccatcttcatcttaggcactaatacctttaaatgctgataggtcaatttgtacgtcatcttagtagcggctgaaattactggggctttaaataatttgtaccacattttgaagtaatccacaaagtaacaattccgaattgcgcgcgtattgctactgccgttaacttgttcctgttctaataaccaggcctgaccagcacgtttactgatgacaatcttagtgtgccgggtgcgtgctggaccacttccagctgtatagcaagcccgatagcggccatctgaaactctttttatagttcccgccattaataatcaccccactcatcatttggggcatccgtataccaatgcttagccttatcatccaaatatccaaacaagtcacattgacgtaagcgtacttgttttgaactgccaattaagattcgaggtaaactcggatctaacagccacaaatcgaccgtctcacgagcaacaccaagcaatttggcggccgccggtatagatatcaatttattctgttttgttgtatccatgttgagggttcggcaaaggctaaggtaccggtcgacatagggtcggagcttctccagttccgtcaaggttttactattgttgcttttcatctagcatttctccctcacgtaaactataacctgccaagccgttaacgtgtccatgcatattaacaattggagctggctgtccccacaatgattgaaatgcttctctcagctttttagaaaaaatacttggattagttgtccccctatccgcaatgctttcgcgttttacccattgactgtactgttcgcgcagatacttcattgataaagtcgcacttcggttttcaatcaagcatccttttataaaacgttcaactggccggctaaacaacatataatcatccttggcttcacgcattgcttttgaaattgtgaaattaaaattatttgtacgcaacttgctaagcccagtaagtgcccaatttaggattccaggaagttcggttgctagcttaacctccaggtcgacatccaccttctccaatggaatttggatttggaaaggtaaaatattcagtcttcgcgaaaagccatccgaagtatctgaggtcgttggcatattgttagttacgaagattaatttggttttcaacacggtagtatattgggcttggtttttcgcgttgatagtgaccgaatcaccgctacaaattgccttaatctccgcagtgtcaaaatccacagtttgtccctcgctggaaaggttagctcgcttgttgaccattggagccataccaaaatcaccagcaaacgattcgattttgctgcttgaaatgtttagcttaccgagtaatttctttaccaaattcaagtaaacggatttaccattacgtccatcccctttgattactaggaaaacattagctttaaatgaagaatccagcaaataacccgtatattgttgcagaaaatcctgatcctgttgatccgggaggacctcatttaaaaactgtctaaacatgggacacttagccttaggttcgaattgaacgtccgaatgcattcgggttagcttcagaggattggcctcgccgccattcttcaaagtatccatgtttataagacgggtaccaaacgccgcatattttttgtcaaagtcatcgccatcaatgggttttaatgatcgacttaatagtgccgttatatgtgcatctactccttgagtccagctatctggaacgactgcgttggtcacggcagttataattttacctaatacctgatcctgctgggataattcataagtgcaaatgtaccagttgtagatcagtaactcattgtcgttggccgtttgtcgcaaactgagaattttacccaaaaactgtgcaattccttctctgttcagccgtaccttatcctcgtcgtaaaccgtacccgtactttgccgtaataattcgataccaaacgtttcaacactttgagccaacgttacatttgatgtgtcctgaacttcctcatgttcctgctccatgtatcccacccaagaatgcttaatcaacgaacgcagaaacccgaaaggctgccagtatagcggctcttcgacctgatcagtggcgaaacgtgcaattttttgtttatcacccaacacttcaacattggtaaatttaaaatgcgggttaatatatgactttagataatctagctctggattgctaagggagcgtgaatctttgaccattacttagcacctccgtctttaaaaacatccttaaagggatcttcatttggatctgctggatgagcctgcatcgctgctaacaacgttttaggttcatcacctgaagcatctttttcctccgctgctgtcttcataggttgcttggcattaaagaagttcgcatcccagtgccaatcaaaagtgtggataaatttacgatcgttaacaacgtaatttttaatctttagctgacatggcattcctgtccaatcgtccgtgtccagttcaaacgtccctgtaacggcatgcattgattcagctaattctagatagcggtcatcgttaggacaaaagaagcggtccgaaatatgatgaccttcaatgttaaattttacgtctacggatgtcggaatcattacctcgtcctggtcataattggcaacaatatcctcaacagtacagttattgtaggccccttcctttaaaggcaacccgatagctaaattaatttttgtcatgttttattcctccaagcttttgtattttaaatatattggttaatggtaacgacaagtccaaaacacgcgccgcatcggcaattgcttgcataacaaccagttgcgttgcttgaatctgattgatttcgcatagaaaaataaattcatcgtgtattacatttacaatatgacatttattcccaagctcaatcattgtttgtttcatcaacaaggatgttgcagactgaacgggtaagttttgtcgtgttgacggcgatagccattcctgaccaatgcgtgctttcaaccgtgttggtttcattgcataataaatattagagctacacctaaatttacgtagaagtacttcaacctcaggatacaagtaatgtaaaacctccatcggtttacgttgaattcgcaatccacttttattaacaattgttagtagccggtttcctccggctccatacaacatggcataaatcaaagtttttgccaactttctcatcaccgatgtaaccgaagtaacatcaacttcaaataacttggcagcaaatagtttatgaacgtcaataccacgctcgaactggtctaataaccgttcacagtgggccgcgccagctagcaaccgtagctccatttgattcgcatcaaaactaacgtaaacgccggacttcccgtgtacgtttggggccacaaagtacttacgcattgcattcggaagagccgtcatcgccatctcgtgagccgtaaatcggcctgagtatgatgaatatgggtcccactccccagatagcctaactatcccatcgtcggtttgattatcggccaaagtatcccgaaaacgtcgcagtaaattatcgtagttgattttatttagcagtagttcaatcacacgatcatcatggcgatgttcgcttaaccagctcacacttactgatcgaatatgcagaccctttagttgagcatatgcaacgatttgagtactgtcttcgaccgaatactgaccaagtcctaaaacacctcgtagatctgccaaaacccgtgaacgggattgcacccatgggtcaacaccaacctttgaccaagcaataaagtttaagtttatggcttggtcacctaaggatcgtatcagcgaacacgcttgcagttgaacacgtacggcttgtcccatccccatcgcatcgaggtaatttacccagtctgaaggattcatattaggtaaatttcgattttctgggagaaaagccaatcttcttaattcccggtcagacacgaaagccccccgaactttaacgtcaccattagttgatttcatcatctatcaaatccggaatacaacctgggatatcgtaataaatattttccaaatcaggttcaacttcaaaatccgttttaaatcgagaatcgaacacaaaatcaattaaccggttgctagaatgagcatcattgccaatagtcaaatcatctttaactattgaaacatcggaaacccggccatgttcgtaattattggtactaatagtatcagtgtgagtaaccaaattaatttgtccaggtaaaacatcaatcattgcattattcattccttacaatctcctttgctaatataaactacgtttagggtaaatcaacatttttagtcttccaaatttggtggctttcgattatagcttggcattactagtcttcacacccttcagaggaaatctggctttttaaaaccaagtccacaaaataatactccatgtccacattttctactgaagatgtgatcaacaaagcatcttcgcccaccaactggtccaattcaacttcaccagaaccatctgacactgtccaaccaatttgtgaaaaaagtgaatcaaatactttaatcttattcactttagtgaacggaataactagctcatctttaaaatgtttaccactagagtatttaaggattagtttattatcgataagaacgacatcgttaatggagatgtactggtattggcgacagtatcccttatatggatcgaactgactgctgatacttacctgttgggaaactacttgcatctgattatttgttaacattaaaattcctccttggtttaacaccacattttgttgagttaccttcaacactcataatattaactggtacgaataatattttttatctctattttacttagaaaaaaatacaaaaaaatcgtcagcgtttagacgatgacgatttagccaattaattatttgcgattaattatttttttaattcctttgccattttttcgttggcttcatctaaaacaccaatttcttcaacaaaatggtaatatttatcaaaagtcgagtactggtgtctctttgactcataattgattcgtttttttataatattattacatgtattcacaaactttaaagatacctcaggatacaagctctgctcccaaattattttgacggagttaacatcaaaaccattcacttcttttactgccatgttgaccgaattaactgccaaagtttgcattttaatatggttaatatccttataattgtatttcataaatagtgttccttgccctaatccagaaacctcactctttttacaccaaccagcaagttcctcaattaactcatttcctactcggaaaacatcacccctaaacttttcttcgattgtcgattctttaacagacgcaaactttcctccattgttttgctgattatcgtaccagattaaatctgggaaagttttttctattccagcccccaaagtattatttccattacggactagattcgatatcttatcctcattataagtttgaaatcggttcacattcttttttaattctgagatgccacttgctcttttaaaactgcttaaagaaccgtataaccttaagttatccataacgccacaaatacttctttggagggaagaaccgtcgaacctgccttcttcacatcaagctgttctcccggataaatatttccccaagaacttctaaactcttttgaaacccataaatagtccaatgaattcttaattcttgtccttctggtgaccggttgactcagatttaaaaaactaatgttctccaactttgagtttactgccacgttcaccaatgtaaaacaatttaattctccatccaaaataaccactcatttcatcttgctcaattaattaataacttaaattatcagaaagtgtagcacaatcaagtcattgtgccacactttctgataattaaacttttattttgaaaccacatggtcttcatccagcatatactgaaacgcaacttcacccgtcaacaagttagctttaaacagcccttggttgccgttattttcatcgcccatgaccacgaagtacgtagcaccttcatcaacgacgtgttgaaaactaaggtaatttcccttgaacccttgcttccggaacaaaccaataatccgaatcatttcacgttgtgtaacttcgttcgctgctgttttttcactcattaattgtaactccaattctcttctttaatcttattttgccgttttagtaactggtttattaccagccaccacgtaactatcagttaatggcgtggcccaccaaccgttaaagcctaagcccatcgattgggtaatttgtaacccagcctcttgaaagacctgaccgtattcattgatattgcggccagtgtcaatgatcatcagatgaccaccaggtttcaaaacccgaatggcttccttgaccgcattgattcgagcctgttcatttttgatgttatgaatggcgaaacttgacgtcacgacgtcgaaactttcgtctgggaagtctaacttggtcatgtccccagttaccaagttaacccggtcggttaggcccaaatcatccacgtttttttgtgccacggccattttattatgtgattggtcccacgacaaccacaagtccaaaccggttactttgccattcgggcctaattgtctggcaatccgagttaataacgccccgcggccacagcctaaatctaggacctgactgtccggctttagatttaagtggtgcatagcctcgtcaaataaccggtacttcccctgagccgtagtgtgcaaaaagatcagggcacccagcaataatatgatgcccatcgtcatttcaatgccgatggggtacttcaaacgattcacgtacgcgtgccacagtaaccccacaccaaacacggtgtagatcaacagcgcaaacggcgcatcaaccccgtaccttttgatattcatccagctttgtccccttttaaatccccaatcttaatctccacggttcaccggggggattgggggctaggggggtatgatttgaacttacccgcttagctcctacttcttaaccactgtctcactaggtagtgaccaagttagcgaccactacccctaattcattaatttaacttatcatcaacactctagtcaagaatcccaaagccttcaagtgattcttcaccaagtttgattataatttaattcattaaaatattcgaattggtctatttaaatcgggccaattcatcatcaattaactgcatggcaatcccaaacgccttcaaacgccgcttagctagggtcaactgggacttataacaatcaggctgttccttagcttccaaagtcttaatagcttcctgaattttgtgcacgatggaatcaatctggcgtttggcttcaactaattcagcttcatcatacatcgtaaagtctccctttgaaagcaatcatgaaacccaaggcttagttttcatgattgcaagtagcgtccattttgccactaattaccaacctcatcagacgttatcggcacttagcgcccaaaaaagcactcccctgaaagcagcggagtgctctaaaaatcagtaaataactattaattatttgcctaacttttctttgcctaaaacgttcaatttttcgtcgaagtcataaacaactggttcaccagtagccatttctaagtccatgatgtcatcatcagagatgcgttcgatgtacttcgaaagggcccggagtgagttaccgtgggcagcgataataacgttcttgccatctaataatttaggcacaatttcgtcttccgtttaacgaaatttgattacatccaagctctacgttgtcaaaactatgttcgcattaaatctacaatctgcctcttaccaaataagaactgcagtggatacaaatgaaaattgacgttgcttaattttttcaacgttccatccattttcttgcagttgcgttgctaacttatgattactattcaacttagatttagttagtgcagaaatgagtttatccatcgaactaaaactattttttgttaattctttttccaacatagtccagttaccgaaataggtagcgtaatcttttatctcgttgtcacttgatatttgaattaaactatatttgtcatcactaaaaacttgctgataaagcgtatcattatcaaaatcgtcgtagattgcctcgtatagctctgctaaaagatatacaagcgtccatttcttagaaccacgcttcccaccttctttagacatcacctcaaagctagccttagtttgatcatcactaggcaatagatggtcatccatataatttataatagcattactatttgatagatttagcgaccaaatctgatgcgcaacatccgaaaatcctgattcaagcttgttggttccctgattcataatgatccgaaatctgacaaaaatagaaattatttttctaacaacggtcaacatatccgattcactgaatcttcgatattttaatgctaagactactggataataaaggagaatatgcatcctatttaggatatctaactgttggtctaaacgcttattttcaaaataattataatgagcttttggacttattggtgattctagtactgtatatatgtcaactaaactcgataaatcagttaaaaattttcgagcttcagtaactgttgatatcttatcactgatttcacgatacaatcttgcttccgaaacaacacggtagcgtgatgcccaataggttctaataaagcgcgtaatacggtcactattattatctaatggcctagtaatttgattccaaatttgattagcattccttaggtcatccttattcatcaaggacatcacatgattttttataatatctgatgcttttaaatcttttccacgactatttagagtctcaaaaatagtgaatgcatcttgtcgactcggtgcagaaatcattacaatgtaaaaatgttccataaaagaatcaaaaatgatctgcagctgatcaattcgtgtacccaactcttttccatgttctatgttggtattgatggatctggttatatcaacatatgcattaagcatgttttttttgggttctgaaatggttttataatcattttcagcaagacgagtattcgttaaccgcttaaagaaattgtctaatgtttcactactattttgatctccaacattttgttgaactaccagtgaaggctgttcgcctttagtacctcgaatagatttactaacttgccttcgaattatacgaagtgtatcgccaatttcatcttccatattaatatcacttggaaaactcttgatcttgtcaccaagtttaatagaaatatcccgaatagctgccataaagatcaaactggtggttaacctttgttgcccatcaataacttcttgctttccttgctcatttttaaaagtaacaacttgtccaaaaaagtgactattatgtttgccatcaatgatagcttgtaagtcattccagaaatcactcacttcatcttttccccatgcataattacgttgatagagcggtacgataaaattattatctcgaaataaattttctattttaaatacagacggactcggaatttcaacaaatgatgacatctatactttcctccaaatactattaatttataattggtaatttctataattaatctgaatagaaactaaaaaattcacaataatttcttacaattgtagcaattaatatttaatgaacgattactttaaacacttgtattgtatcatgtttccagcataggacactagcgcaatttatcagtaaaggtcacaatactttccaaccaatggctgctaccttagccgctgctcaaactccccctagccctgaattagctaaacaagactcagattgcaaaagacagggtgtggtcatcattcgattcttacggcaacattgacgactttaattgcctatcacttacgattaacctgttcaccagcagccatttcgaccacctttaacttaagaaccgctttaatttataattagcttaatcacttccattgaaacacaacccataactgttgatcatcggtcacgttggtgcttccccaaatcaggtaaaaactgatgataccttagcagcaccttaactaattaatcgacgaccgttaaaagtacatcatccacagatgaccattgaaaggttccgggctaattcggattaaatttgtaatcttgtccaaattaaatttacaatctaccaaataaccaattaattactcgatagattgtaaacttaatccgaactaacttatttcaacgcctatctagtggcgctgcaacagtgtataataaaattggtaagtatacgaactacggtgttcaaaatgatgcagaaatcatccacaaatatcgtgttgcgttttttagctgtggacctttctaaaaatggtgattaaactgattaaattggcaccatgaattagttaggcttgctattttatcaatctacattggagtagtgagggaaacgttatgaaatattgtccacattgtggcaattcggtgcgggagaaagctaatttttgtccaagttgcggtaatgctctggttgaaactagccatgcacaatcagtatcagatagtaacaatcaatttaaagaaatttacaataatgcaacggctaagttgaatcattatacaggtgaagagggcgccgttaaggttaacattgtagctttattctcagaagtcttcaaacaccacactaaagatgaggccaattctatttttattgcagggactaagacgactacacctgctttgtcggatgtttcagatgaatgggcaaagccatggttattttcgcgaattctgttaggatttttactcgcatttgtggtgttgctatatatggtagatggtttcagtaacagcaatgcgattcccggattgatcctggtgggagcctttgcagtcccattttcaggtctagtatttttctttgaatctaatgcttttaaagatattagtctttttgaagtggttaaggtgttctttattggcggaattttttcaatggtcgttacattgtttttataccaatttgtcacttttagctcgactagtcagatttttggggttttgacactcaaggattctttatcaattggaatagttgaagagcttgggaaagtcttaattatatcttattttatcagtcaattagatgtgcaccatgtgttagatggcattctgattggcgcggcagttggttctggctttgctgcatttgaaacggctggatacatttatagggcaaatgctcaactagttgcagtggcaatcttgcgtggctggtcggccattggtggtcatttggtatgggcagccatcactggcggagcaattatgattgtgaaacgtgaccatccgtttaagtttagtcagttgttagatacacgctttcttgtatttttcgtcttagcagtattgatgcacgctgcgtgggactggaacattaccatattgggcagtaattatctcaagttaattttattgattgggctagcttggatcgtggtatttgtgttgatgaatgcgggtctaaaggaaatttcgcatttgaaacaacaatcacattcttaaaatgaaataagttttgatggtagatcacaaattcaactcgaattttttgcccaattaatcaccctaacccgataagatgtttagtctcctatgatgtaattataattattagaaaattgttcaatataacgtattaaaagagccgattaactcaaaaaacaacgcccatcatctagccatttaactaagatgataggcgttaatactaatactaatcattactaacagcgtgattctcatccaacatatattgaaagacaatatcaccacttaataaatcaattttaaacagaccttgattactattattttcatcactcatcactacaaaatatgatgctccttcgtctactacgtgctgaaaactaacgtaagtgcccttaaaaccttgtttgcgaaactggttaataatccgcaccatctcgcgttgcgttacttcattagttgcttcactcattttttacacctgatccttatgcattatttatctgaatactattcatgtctgatataaagttccagccattgatccaattaacaaaatgtcaattggcctctcttatgggagctaagggggaattgggggatcccttttaaattactcaaggcagtaaattattttctgctttttaatttctattttctagatagtgtccatttagcgtccatttgccactaaatgccaaccctatcccacgttatcagacctcagcgcccaaaaaagcactcccctgagacagcggagtgctccaaaaaactagtaaataactattaaattatttgcctaacttttccttaccaagaacctttaacttttcatcaaagtcatagacaactggttcaccagtagccatttcaaggtccatgatatcatcatcactgatttgttcgatgtacttgcttaaggcacgtaatgagttaccgtgggcagcaatgatcacattcttaccatctaacaacttaggtgcgatttggtcttcccagaaaggcataacgcgttccaaggtaaccttcaagttttcgccaccagggacgatgttagggtctaagtcagcgtaacgacgatcgttaacggctgaaccttcatcatcggcactcaataatggaggtaaaacatcataagaacgacgccagatatgaacttggtcgtcaccgtatttttcagcggtttccttcttgttcaatccttgtaatgcaccataatgacgttcgtttaaacgccaagtcttggtttctggaatccagagttggtcggattcttcaagcacatagtgcaaagtcttgatggcacgagtcaaaactgaagtaaaggcgtaatcgaattctaagcctgcttctttaactttttgaccagcagccttagcttcttcaacacccttttcgcttaaatcaacgtcaacccaaccagtaaattggttagataagttccattcactttgaccgtgacgaatcaatactaattttgccatagcagttaatgacctctttcttaagttatttactcaccctattttacactgaaaaagcgaaaaatcaaaacaatatcagcgcttattttcagaatccgggtggaaagtaatcgtttttttcagattaatgttaggtcgcggccggtgaaccggtttcacgccgatgatgtccaaaataaagttaaaaatcggtacaccgacgatcaatccccagacaccaaacagacgctcactcactagcaatacgacaaacgtataaaaaatgggcagctccgtgcgactcgacataaacttgggattcaagacataggcttctagggcgtgcacaaccaaaatcattaagagcatatagaccacgtagcgcaacccaccaaccgaataggcaatcaagctcagcggtacgactgaaatgatcaccccagcgactggaatcagacttaaaataaagatcattaatcccaagctaatcagttgaggcatcttcaagattgccatgaaggtcaccgtaatcaccgtattgacaatcgcaatcaaaaactgtgcttccaaaacaacgccaaagctattcacaaactttttggcaaagaaatggacgtcttgaaagaaccagccaaacgtactagtcaaaaagcgcttcgtgaagacccgcatctgatgatcctcaatcgtaaagaagaaacttaaaataaatgataagaagaaggttagtcccatattaccaatattagtaatatactggaacacaactgaaatgccgcccttcaattgtttgagtatatccgattcttgaaaatacgatgtcacccacgtcaacacttggttagtatcatgtgatgggttctgataaaaccgatagactgattcaaacgtcaaaaaagtttgtttgatcaactgcggtaaataaatcgatacagcaaagtaaattccaagaatgactagtgcgtagaccactaggacaatgatcgtcggtggaatcttcacccaccgccgaactgcccgaactaaccgcgtcactaagaacgtaaaaataaacgttaataaaataatactcatcatacttgatgccaagtatagcgttaacacaatcaacgccaatacgcaggcgcgccgccagcgcacatttcgtattaactgtgaccaaaattccacaaaatccacccctctactatcccttactcctattctaacggaaagtctcagcaataaaaattaaaaggccgttgtgaatcaacaaaaaacgtgtcaagtttatcactaatcgcacgataaacttcacacgttcgtttaaataaacacttaataacttatgagaactgcatctttaagctctctaatcctagtgcttggtgaataataactgaggcgccacccaacaaggccgccgattgtacgttcttggttgcaatgattggaacttgccggcttggcgaagttagcttggccgtgctctcccgaacattagtcaatagttgtggcaagatttctagaacggtcgtgttcaacacaaccacatccggcgcgaacgccgtggaaacattcgcaatcactttagatagatagtaaacaaagtcatcgaagacctttgtcacttccggatcatgattgatgtagtcatgcttgaccgtcgttaaatctaatcgttcaacatgcttgatggccttcaaccgagcccacaaggctttttcagaagcataatcgttaactgatgccaagtggtcctcaacgtgccgatcttctaacaaagcagtccccacttcacctgcttcgccttcatgaccagaatatagtcgcgaatcagccacgatgcccgcatgaatctgatcgcgaacgactaccgaaaccacgttatcgaaaatctcgttgtcatggaaatcacgttcaaaaacggccgttaagttagctttcttttccagaacaaccggaatccgtagcttatcacgtaaatactttgctagatcaaagtgtgttagtcccttgatcggtgtcttgaggattttattctcataaataatcccatccagcgcaatggcgacccccatcagaccatgaatcgtaccatagtcatcaacgttccgtaattgatcttcaatcaaatcaatgacatccgtcaacgtcatatcgctcgtcttaaagctttgaaagtgcaaaattttaccattcaaccgtgaatacataagtttgactgcgtcagctgtcatgtcaatgctggccacaaaaccatagttcacgttcagctcagccatcactggtttacgaccgccgtttttcgtgctgacaccacagccaatttccttgatgaactgggtccgcagtagctgattataaatatctgaaaccgtcactttattcaaactcaagttccgtgaaatctggctccggctaatcggtccttcgttaataacctgctgcagaacttgcttttcattcgtactgcgcattacatgtttattaataatcatactgaatttcgatgcccaccattgacaatcgaactactttacccaatcatgttaatttggtctgccattaattcaatcatcaacgggcaccttaaccccctaatctgttaatattctatagcatcaaacaaaaatagtacacaaaatagtcaattttatacccattttgacatatgaacgttaaaaaaaggtcaataccgatataaaatgaccgcccccgtagaaccaaaatatcaagaacgaaaactttccgtccttactcctacattctataacagtttttataaaaaaatcaccgattgacacctaaaagtaggtgttttatcgatgattgttaagtggacttccatactgttattaaattgtttatattactgcaacgacctcgctgcttgcgccagagacatatgttgtaaactggcttgttgtaaaatggcctcgatttgggcatccgtatactggctagcattaaatccagcttgcgctagctccgcacgcgttgcctgaatctgatcagagctataattcatcgtttgggcagcttgcgccagtgagaggtgttgcgccgctgctcgttgcagaatagcacgaatttgggcatcactataactactgccgtcgagcccttgcgcggtcaactcagcacgagtcgtctgcacttgactgtcaccataactgttgttagctgcagctgacgagcccatcgaatggttagctgaggaagttgatgatgaagcagccgcctgctgtttagtggttggcgtgcgttgcgtttgttgctgacttccggtcatccccgtaaccgcttgtgccgcactcgggatcaccggcgctgaaccggtcaatgtcttgagtgacgcattattttgtttctgtaaatccaacacatttttccgaatatcctgatagtaacgttgcttaaacgccttatcctgcaataacttagcaattacaacgttagaatccgtaaactcattcgctttattcagctcagcagctttctgatactgttgttgataagtcttgcgtttttgttgcactttttttattaaggcaagttgttcttgggcctgattaattaacgtaactgcaccgtgcttggtcgtcttaaccgtcataaagtcacgtttagccatgtcaaatttccgcgcagccaatgcttcttgaccagccacataagtctgggtctgggttaaataccgttgcgcctcagtattactagctttcgttctggtcgcatgtgtaaaactcgtctccgctaacgtataattccgcgcttgcagtgcccgctcaccagttcgcatttcagccgtgtatgagtcttcctgcagacggtaccgcgtatatgaataactaccaacccccacagcgataattactgcaaacacgatccacatccatcttttcatcacgacacccccatcaactgattttgtaattaatttattataacatgtttacgaatcaggtcgcgattcgttgtgcttacaaaactgttttcataagcgtataataattagtgtattttacgaagaaaggatccttattgcaatgctagaaaaaaccttttaccacacccttctaagccactcattcaatatgcccgtcacagtcaactactgggatggaagtagtgaaacttatggtgaaggcacaccagaagtcacggtgacttttaaagaagccattccaatgcgtgaaatcaccaagaacgcttcaattgcccttggtgaagcttatatggatggcaaaattgaaattgatggcagtattcaaaaattaattgaatcggcctacgaatcggcagaaagtttcttcaacaattctaagttcaagaagttcatgcctaaacaatctcactctgaaaagaagagtcaacaagacatccaaagccattacgatgtgggtaacgacttctacaagatgtggcttgatccaaccatgacctattcttgtgcttacttcaaacatgacactgatacattagaagaagcccagattcataaggttcatcacatcattcaaaagctcaacccacaacctggcaagaccttactagacattggttgcggttggggtacgttgatgttgactgccgctaaagaatacggcttaaaagtcgtcggggtcacgttatcacaagaacaatataacctagttgctcaacgcatcaaggatgaaggcctcagtgatgttgctgaagtccggttacaagattaccgtgaacttggcgacgaaactttcgactacattaccagtgttgggatgttcgaacacgtcggtaaggacaacttagcaatgtactttgaacgcgttaaccactatcttaaagctgacggcgttgccttattgcacggcatcacccggcaacaaggtggcgccactaacggttggttagataagtacattttcccaggtggctacgttcctgggatgaccgaaaacttacaacacattgttgacgccggcttacaagtcgctgacgttgaaaccctccgtcgccattaccaacggacgactgaaatctgggataaaaactttaacgctaagcgcgctgccatcgaagaaaagatgggcgtgcgcttcactcgcatgtgggatctctacctacaagcctgtgccgcttccttccagtctggtaacattgacgtcatgcagtacctcgtaactaaaggtgcttcatcacgaaccttaccaatgacccggaaatacatgtatgcggataaccgaatcaataaagcttaattaaatgccaaaataccaactatctcgattatttcgaaatagttggtatttttttgaccatttttcaggaatgactgacaactagctttcagtcaccgccatgcgtacccaacccaagatctgatggtagatgagtaacgatcctaggaagaaagcggccgctaaaccggcggatgtcggtagtttgttaaacatattggctggtaacactaaggctaatagtggaaaggcatacgctgctggcaattgtaagttaagcgcccgtaaccacaaatacacaagtggtaaggcaatgaccgtcgttaatagccacgaagcaatcaataggtgaatgccgaccccaatactagcagcagccgacaatgcaagccactgcttaagtgcggtcgttaccgtatattcagactgttgagccgcttcaaagaaaacgacgatcacgggtgggattgcggccatctgggactgtcccgctagccaaacaatacccacccagacaaaaactaggctgataaagccgagcatttgccagcgactagcagaagcttcggttacccgtgagattgatcgcggtcgttgaatccaagccccaatcatcaggcaaatagtccagaaaaagatggctacgataaaggtccagtgcgttgcattaatgataattggcagtaagccagtagcaaaggctggcgccaaattcgattttaaccccttcaataataatagcatcagtaatagaccgacaagcactttgagggcgtacgaccaaggtagttgattgactaagaagccaataattgcagttccagatggtactaagaataactttaagggttgccgagtccacgccgtcttacgataaacccacgtcccggctgtcagagcaccgatttcgggtaaaatgatttccgcatcatgttgcaatgtggcactcgccaccattaatagaatgaagctccacccagctaagtatcgccaaccatcgctttgctttaaatccatttcgacaaaatattcctttcttatatttaattagatatatttatattatcaaacgtcaacgactagcattgtaccataaatacaatcgtctcctcaaataatcctgaaaacacatcaacagttttcaggattattttcaaccactttcctgacctctaaatcaaaattcgactgagtaaagtcttacccagtcgaattcagtcgtcgcgccaacgcagtcagaaaattatgcattttgcataagccttttgataactaaacggttatgctatttatcgtactagtaattggttaaccagcctacgtacactagccgttacggcctaacatcaaaaatatgaagatggcttctgctactcgtaaccaccaccgatatcggtgccaacgtaataccgaccaatggtgttttaaccactgattggcatagtgcgcaatcagtggcgccccgataatcataaaaccctcggtccaaaaatcgacgcgggcgggccaagtcgtgttatcaaagccagcaccaatggtcgcaactacgagcaagatgtagaggccccacaaactgatttgtaaaggtcgtttgactttcggccaccattgccgggcctgtattcgcttaatcattgattgacggtgcggccgataatgctcatgaccaggtaacgctgctaacattgcagtcgcactttgatatcgttgctgtgggtctagggccgtggccttcataataatcggggcccatgttgaatcctgtgtcagtgtcgttgtatctaacggcccgctcggctcttgaccagtcaacaaacagtttagaacgacccctaacgaatatagatcgctccgttgatccgtttgggcgaagccatagtttttcaggtgcggcaaaaccgatcgtgcctaataaacgagtatcactgtcttgctcagcatgatattgtcgcgctgcgttgacgtcaatcaaatagtagtgatcccgataacacatcacgttacttagtttaaggtcccgatgcacaatttgttgttgccccaacgcctgtagcgttatcaacaattcttgtgcgacgcgcaccgtcatttcgggggaaaacggtccttgtgttgccaatcgatccgctagtgtttgaccattaattaaggtctcaacacttacaatgcaatcagccgccgttaataatgcttcgatccggggcattcggggaattggctgctgcttcaaacgctgtagaacaggaatattatcaggatttactagtttagctaccgaaacaacctgttgcttcttaaccagtaacggaaactcgcgttgcgcaactaatggtcctagtggttcataaccagccgtacttaacaattgcattgcttgaacaatcggtaacaccgtgacacccccctttttatcaaaattactaacttttatcataaccatacttttggaggaattacaatgtcaaaatatcagaataacgaagtcacaccagtcgcaccccattcgcgaacagccgaattagttttaggaattattggcggtatcttcggtatcattgccggcttactggcgatgaccatcggcggcatcggtagtgctttagaaaccagcggatcggctggggtcagcaatcttggcgttggctgcattattgtctctgtcctcgcgattattttaagtgtcatgattaaccgcaatcacgttttaatgggctggttgatcatcctttgtgggattcttaacttcgtctttgtcagcttcttcgggattctaagcggtctgctcattgttattgcgggcggcttagcactaagaaagtaggtaagctcatgcaaaaaacgaaagcttggtatcaaaaatggtgggcgtgggtcctgattctccttggcatcttctttgtcatcagcctcgtcaattctccacaagacggtaaaaactcacaagcagcgacgaccaaaaagaccagcgctagcaagtccaccgctaaggaaaccccggcaaatacgatttataaagtcgggcagacagccaccatcgatcacgtgcaagtaacggttaataatgttaaaaccgcaacgacgctcaatgatgttcagcctaaaactggcaatcaatattatacggtcaccgtaacattgaaaaatagcggtagagataaagtcagctataacccgtttgactttaaaatcaaggccgccggtaaccaaactagcctagatgagatcaacattgatgaaaataaccaattagatagtggtgacctgaccgctggtggctctgtcagtggtaccatgactggtcaagccaaagcagatgggtccgttgaactcatctacaatcccagctacttcagtgatcggcatttgacctttaaattacagtagtttctggtacactaatactaattaagaaggagtattaggggggcactaaccgtggtagaacgcgcaactaaggaactatttaacgaaatcaaacatgcaagtgaggccgaccaatttatgacaaatatggccaatagttttattcgtaccaatccggcggaatacctcgccgagcttattcaaatcaaacacgtcactaaaagccaagtcattcggcgcgctaatctaacgccctcgatcggttaccagtacttcgatggcaagcgccgacctaaccgggctcgcatcatcgccctcggattcggttttcaactgaccctgaccgagcttaacacgatgctcaagcgaactggttacgccgtcctttatgcgaaggatgaatgggatgctctggtcatcttcgcacttagtcagcgctttgatcttaatcgtactgatgaactactttatcaatacggtctaggcacgattaccgacgaagattagcgtagttgccatcatcctcactaatgtcctatgtcagactcacgccagctaaaagttcggcataaccaggttttagaataataaaagaccaggccctaatgagcattcaactcattagggcctggtttgctcaatctaggtcaaagataaaaatgatggtttcaatcaatacaatgaacgggatgtatcgaacaaataagataaagtaccagaaggcctcgttaaaactcacaacattgaatctagttatccctagaataatcaaacaactaactagtatcaaaatggaaaatagcttttttatccttaatcgtttgccaaactctgaccccataattacggccagcaacagcccacaactcacatacccagtgagctgattactatccagcttaaatccaacctgaacccccgtcgaaaagtaaagtgccgcaatgtatatcagcaagtaaatccctgtaataacttgaattcgtctgtagctattcatatgtctccccaatttagcagttcttagaataaaactatactaaaaggaaaccaataagccaatgcttttttcagctatgtagcacctgtaattaagcatcgttaaaataaaaaatcttcaacaataaatatttcaatcccggttgttcaactttagaaccgtgcgcaaggccgattaagaagctacagtcaggtacgctcaatggcactatcttacgcatccacgtctgttcccaaaacagataaccactgtcacaactgtagccaacaaatccttgattattaaattagtaatgctcattttatacatttaagttgactcgcttctaaccaaggataggtcatcaaggtgatagcgctactcttcgaaattttttgttaacaattcaacgtttcttacccatcaaaaaaggccaaacgcattgcgcctgaccactaaaatcaactcgtagtgaaggtgataaatacctcgttctaaactggcgcaatcaaataatacccgccactaagtccaatgaacaagtagatcaaatgccggactgtcgtcatgggtagccgcggcagaattcgtgccgccagcgccgtcccaatgaccgcacctaccataccaatcataatatgggggagcaagactggcgtcagaataccgttcagtacgcggactgtcgaaatatagaccacatcgatcaaaaagaaagtctgcaaatttcccaagtaatccgcagtcgtatcggcaagtgatagaaaataaagggccatcagcgggccgccaataccgaataacccattgaagaaccccgaaataatcatgaagagaccggctaaccaccacggataagtctgatttgccgcacgtttgctcagactaaagtacccggctaacgaaactaacagcgcacctaataaccgtcgtaataattgcacatctaaaacttgaccaagatgtaccgaataggccgccacactggcataaacgataaacggcacaataatctgacgaaagtggatatgctgatgataacgccaaactaatgttatgacactggctgccataataacgcccgccacggccgcactttgagcaatcggaaacaactgtggtaaaaagatcatcatgacgatggccgcaccaaagcccgttaacccttggaccagaccagccaataatccgggtaagaaaaccaataaccataccatcaacgtatcctcttttcatcataataaaaaagaaccgggtcacccagttccaacaaaatctaaatatgaattagtaacacaaaaatcatcactgagactagaccaatcaccactgataaagtcattgaacgcgtgcgataagccacaaatccaacgagaatagcagaaataatcatccccagattgccagaagtgatcactgcgtacttactatcgataaagacacttttaacaactaacgccgtgaatagtgagacgggtacgaaccgcatccattcattaaaccattctgggatcttccgcttcgtaaagaacagtagcgggaaaaagcgtggtatgaaagccacacacgcacaaaaaatgaccaaccaaaaatggtccatactactcattgagctgactgattgcataagaaaaacccctctgtgccctacttgtcagattcttccatggctgtttggccagtaggatcgtgaaccttatagagtaaatgactttctggcttatgtgccaacaagtaacgttcaataaagtaaccggtcaacgacgcgagtaatgttgacaccactaggcccagcgtactcttcattaagaccagaaaacctatcgttagaacgccagacaaaactgccactaagataatcaagcggctcttagcttgcataattgccatataaatgaatagtgccgtcagcgcaaaatccaccacttggagattaatcgtcaatgcactgccaatcaaactaccgataatattacttaccgtccaaaataataacgaatagtgttcgaccattaaggcctgcgatggcttccaatgcttgtccgtcgcaaactttaaatagttgaccgcgtaattttcatcattcatcgaaaacgcaaacgttaaaatgaacggtaatgattgccccttcagatagcgcgataagctggaacctaataaggcgtaccgtaactccaagaaaaacatcatcaaaataatggttgtcatcggtgcattaatcgtcaacatcgatgcaattaaaaattgggcaccaccggaaaagaccattaccgaaattaacgctgtcagtagatggttgaacccggccgcatgcaataaaaccccacaagctaacccgatgggaatatagctaagcccaagcggcattactgttcgtaataccactaaccaatttggctcgttctttttcaccaagaatgcctccagtaccataccagtaaagaattctagcaacaatagcgagtgtcaaattacttagacactcggacttaattttaacatgttttttattgcaatcctacaccttgttaagtttttaagcgtatgtaagcggtatcaatgccattttttacttgaaatgttgtcccagaatcactaagtcattcggtcggccacctaattcagcgacttctggcagaaacccccactgttcgtacccaaactttttgaacagcttaatgcttggaatattacttgaaaaaatataagcgataatcgttgttaatcccaacacaggtaattgtttaggaactaatgtcaaaacctggctaccgattccctgtccttgaacactgcgatccaaataaactgaaatttcagtcgtctttgcatacgctgcccgtccataaaatggtgacagactaacccaaccgactactgagtcgtcctttaaaacaacccacagcggatagtgttcaggggtatgactcaaaaaccaatttcgacgttgctcaaccgtaactggtttaagatcagccgtcacttgatgactgggaatcgtttgattgtaaatatctacaataatgggtaaatctgacatggttgcagttcgtaatgatacgctcataggtgactttcactccattcggtttaactactgttatcagtcttcattatacagttaatcgtggatcatgctaacaaattctacataaatggaaccgcaatttatccgcaaagctagcattcaaatattagcaaaaaaagaaagaacactcaaactggaacgcttgtagcgaatagtcgaagtagtggctaagataggcacacagcttaatttaggaaataatttttaacaaagcacctcataattatcccgatttaaacgttgcttttttagcatcgccaaatgaagactattagtactcttttatcataacatccgcagccgttcaacttggtcatccttgacagtgcctttttgaaattactctggatgctaattatttttaattagctaaatcagtggcacagccctggtcattagttgcctgtcatgaatcactattgccaacaaaaaaatcctccttgagcaggcaagtctcaattactagcttgcctactcaaagaggaatatatcttttaagaaatatctcgtagcgtttactaagctaatgcacccacagaatccaatacactaactgctataatttagttgaaccagctcttaaccccgcgccacatccgtacaaagatatttgctttgtcgatggacttcttaggcgttacattgatggtcatattcttactagtcgttccgtcaactaccttgatagctttcttgcttaggttcaagttaacagtaccgacagtcttgccattcttaacgggtgcttgtaatttaccatcggttgtcgccgacttcttcaagctaaccttaccagtaacggcactagcatccgtcccggttggcaagtaaatcttggttgcaccactatttgaaacgagttgcgacgttaaggacttcccatcttggacatcaacggctttcacaccattgatcttgccattcttgttaatcgtcgtagtcgtgtagttgtggtaaacatatgacatgatttcagccgtttgagtgaaacgttccgtcccactatcgttagcggcaccggcatgcatgacgaccgtaatgatccggttaccattgctaaacttaacggtcccagtgaaggcattcccagccttagtggaagtcccagtcttcaaaccatccacaggaagtgcggagtaatgtttaactaatcctttgagcatgtagtttcggttatccatcttggttgctgaactagtacccttttcaaaccaagcatgggcaatactagaagtctttaaaacttctgggtaatctgataatagcttttgcgcaacggtagcaacatcttgtgctgacatttcgttttcagcactggcggcaacggtactgtacccaattgtgctgccaacctctttattggttaatccactggcattaataatggtagcgtccgtgatcccccatgctttagccgtcttccgcatcaagctaacaaacttatggggcgtcccggctaccgcgtcacccaaggctgtgatagcggcgttagcggaatagatttcagtcgcgttatataattgccgcactgaatacgtcttcgttgataataacggtacgttcgcatattccgtgttttggctcatcttagcgactgccttgctaacactgattttttgattccaagacaacttaccttcatggatcgccttaagcactaaatatgtacttaacatcttcgtcattgatgcgatcgccattggcttactactgttcttatcatacaggatctgaccggtcgacgcgtcaaccgcaatggcggctttcgcagagatcgatggtgtactggctgcttgggcctggaggtcagcccccgcaatgcctaaaccagctgtactaaacgtgactgccgcaacgagggcaatcataactttctttaactttcccgcaaatctcatttctcaattatccctttcttaattgctaatgctagttttagtttaaataattatgtctgtggaaacaagttaatttatcatatccgattgtttttttgttaatgggtggtcatgtttaactggcaaatgaataacaaagcttgtctgctcatcatcactttgcgcataaatatagccaccgtggtgatccacgatactttgggcaatcgctaagcccagtccagaacccccggtcgccttagaacgcgattcttcaacccgataaaaccgttcaaataagcgtcccaacgactcagctggaatacgctgaccatcattcgtgacgtgaatcacgacttcttcaccacgttgttcagcttgtaatactacgtttttagcaccagttccatatttaaacgcattagtgatcaaattgctgaagacccgccccagcttttcagcatcggcttcaatgtaaataggctgcgtgccactttctacttcaatcttcagatgcttcttgttcgcttccagctcaaagcttgccgctaactgttctaacatggccgtcaagtttaaccgattaatggccaacggtgtctctgtctgccgtgatttcgtatattcaaacagatcttcaaccagtgacttcatttgtgttgccttcaaataggcaatatgcgcatatttaattaaatcctcttctgattggtactgtttgttctcaattaagcctaaatagccgataattgacgtcaacggcgttcgaatatcatgactgacattcgtaattaacgcatccttagaccgctcaatttcccgttcctcgtccatcgagtggattgccgagtctactaaggcattaacactttcaacgactcgttgtgtatcaccagtcagattaaagtcaatccgatggtcaaagtggccggccgcaatataatgcaactcactaataatatgtcgtaactgcatctgtttgtatcgtcgaattaatcgccaatataatacgaaaccgtccgcaatcagcatcagtccaataaagatgttttcataactccatagctggtagttattgggaccaatggtaatcgatcgtttaatttggaaaataccgctctgtaaccccggattatgcgcaatcgtactgttgatcagtactacgatcgacaagtttaaaaggagtagcaaaatcaccgtcactaccccttcaaaaaataattcacttttttcgcgtcccgttaatttcaaaagctaaccctcactcttaacgcgattcgatcttatagccaacgccccaaacggtctgaatgactttttctccatccgtggcttcttcgatcttatcccgcaaatgactcacgtgcaccatcacggtcttagctgagacaatactttcttgctgccaaacacgttcaaaaatatcatcagctgaaaagactcggttaggatgacttgcgagcaaatacaaaataccaaattctaacgcggttaattgaatatccttacccgtcaacgttttaacttcgtgcgaatctttattgatcgttaacggtccaatgtccaaaatatcaggctcggtagtcgtcacgttattttcagaacgtcgtaatagtgacttgacccgtgccataatttcaagcggattgaatggcttggtgacgtaatcgtcagctcccgtaatcaagccctgaatcttgtccatatcgccagtcttggccgacaagactaggattggaagttgggaatctttccgtacttctttgatgacctcaatcccatccatttcaggcatcatgatatccaaaatcattaacgcaatatcaggattcgtatttaatttagtcaaagcttcacggccattataggcgctaattggttcatagccttcgtttttaatataaatttctaatagttgtgcaatttctttgtcgtcatcgactactaaaattttcatcttatttttctccttaaataattctgtttttattttaccaaaaaagcgtccgggcttggcagttaacgattgattttagagaaaacgcaactattccgcgtcatttgccgtacggtgaactaataaccaggtatagtatccacctactaagatcaataatcccgccgcaacccatatcgtccgtaatgtccaccaccgctgcaatatcgccgaaacaatcgcgcccgtagcaaagctcaacactaattcccaatacactaaaccagtgtcaagctccatgcgcacgcctgtcaaccaataattcgtcagcacgatcgttgccttcttgagattaccggtagagaacacgttattatagccgtggccggcgattgcgctgaaggctgtcgtctgcatcgccatcacgaatgcgagtggtgggaccaccatcgcattactaacagtcgctggtagcatgccgaccattaaacaaacaaccagctctgccaccaaaacgggcaagcgccagtagtgtgaccgcgcgcccaaccattgtttcagtatacccacgacaatcacacctagtgtaaaaaagaggactgttgctaatttagtcaacacacccggtaaattccactgtgccacatcaacactgagaaaaatcaaattacccgtttgaccagctgctaagacaccaccccgttggatgaatgtgtatgcgtcaataaagccaccgatacaggttaagcccaagccaatttctcgtaactggaataaatggcgtgactgaaaccgttgcatctactcacctacttaatatgttgaatttggcacctcactaaactggtacaatacgttttaataagtccatcatagcgcaattaatcatcagtacctaacgaaaacgcgccttttaacccatgacaggttaagagacgcgttcataatcatcacatcattgctgatgattctattgttagctattttgggtggttaaataatcattaaacgctggtgcgaaatgggcatcaactaccttaacgtgggccgctttgaaaactgaccgaatcgtcgcaacttgcgtctgcttgtccatcatccgctgttgctggattttttcacgcaaataatttgtcacatcaatctgcttaccgctatcatcagttacagccgcagtcttagatcgacgactgacaacgttgataatttcataagttggtttgtctttcgtgtcggcagttgccataactgttttgaccggtttcgtgacatagtgtcccactcgtagtttagctgtggcctgtacaattgctggtgctagagtttgattataactgtcaaactgcgctaattttccagcagttgtgtgcgcttgtcgattattctgatattttcgcacttgcgaatcaaagctagcacccgcattcagttcagcaataattttttgcgcttgcttctcattggccgtcgcaatgtgttgaaccgttgtcattggcatataagctgctcgggctttttttagttgcgctttagtcactggatacttagcactaacggctttctccatcaataaattcgctttgatttgcgattttaaacgcggttcagtgacatgattacgttctaaaatcatgtgataatttgcgcccgcctgccgtttgaatgcttttaatttagcagttacttcagcttgtgaaacatgatatcgttgattaaggactttgtttagagtcaattcttgaacagcctgttgcgtcgtcgcttggttttcaatttgtttaaatacttccgcttgtgtgacctggccagcatctgacttgaccaatgtcgtagccttcgcttgacaccctgttaacatgactgcgacgactagactcgcacctacccctattaaccgatacttcatttatattagcccctttctttgcatcactaatgccacgatatcattaaaaatctaatgaacttaataagtaacacaatcgtgtacagagctagtatcaacgtcccaacaagaaagaaacactacggtcaatctacacgaacgttacatctgcctatatcttccgctggtactcaccagacaaaaaaacgtagaacaaagttgatgttctacgcttacttgatgcttattcaactaaatcaatcagactgactcatacgatatcgtcattttaaccgttgactgaatagttcggtgcattctttgtaatttgaatttcatgtggatgtgattcgcggagcccagcgccagagatttcaacaaactgggcgttttcgatcaaggcatcaatgtctttagcgccaacgtagcccatgccagaacgtaaaccacctaacatttggaagataatatcatcaacgctgcctttgaatggcacacgtccttcaacaccttctggaactaacttgttcgcttcgttcacgccgccttggaagtaccggtcagacgaaccatgagcttgtgacatcgccccaacggaacccatgccccgatagaacttgtattgacggccatcgtcaaagacaacctcacccggtgcttcggctgttccggctaacatactcccaagcatcacggcgttgccaccagcagcgagggccttaacgatatcaccggaatacttgatcccaccatcagcaatgatagctttgccgtattcgcgagcaacgctggcagaatcataaaccgctgttaattgtggcaccccgacaccagcgacaatccgggtcgtacagattgaaccagggccaatccccactttaacaacatcaacaccagcttcaaataaagcacgcgtgccttctgccgtcgcaacgttaccagcaatcaatgtctgcttagggaagtgggcccgaatttccttgatcttccgaagcacaccagcggaatgaccatgagccgtatcaataacgatggcgtccgcaccagcggcaaatagggcttcagcccggtcaaaggtatcactagtgaccccaacagccgcaacggccaacaagtgattgttggcatcaacggcagcgtgtgggtgatcatcatccttaacgaccgctttgatcttcttaacttcttcagcctgcgcttcaatgcttaagttcttatggataacagctaagccaccttggttggccatcgcgattcccattgcggattctgaaacagtatccattcccgcactaataattggaatattcagctgtaaattatcggcaagtttaacacctaaattgacttcattcggtaaaacatgactttcggccggaattaatagtacatcatcgaacgtataacccttttttccaaactttgtatcccaattagacattgaacgttagctccttatgtttttatttttatctgtaaaggtaacaaaacatcgcgataaatgcaaggggttgcgcagattttcagaaagttcttattttaagcctgtaacgcccaaccgaatgttccaggttgggccgagcgtacttcacacacaactttcattcagtcattacatccgtatcaccagtttaaaagctaactaggtgaataacaagcaatgaccacttgcaatcgacaaaaagacaagccaatgcacgccatcagcttgtctttcagtccgagcctaaaacatgctcgtcgtaatattaaagcgccgcttcaaccacatccgggcgaagaagacgacgacggcaatgatcaagtacgcgattcctggtaagaccgggttcaatggtccttgaatcattgacatggttgtaaagactaacatccaaacgatgatagccagtactgaccacgcgattttcttccataacgaaactttcttgccatctttagcaggcattaagtattcgaataacttagcaacgcccaaaccaccaatggcggacgtaatcagaatagcggtgatcccgttggcaccagctgaattcttagtagcgttcgtgccgatgaagcccatgatcccgtacattaagcagaaaatcatgaatagcatcaagccattatccagcgccgtgacccaatagttcgccttttgacgttctaccggtgtcttttttggattcacaatctcttcggtccgttcttgaacggtcccgtataattgacgagccgtggttccccgaccttgttccgctaacaatgtagacgtcatttcattcagaactgccgtctttttctcaccactcaacgctgtggcatcaagtgacttgcgcatctgacgcatatattcagcattgcgcttcgtcaactcagtcgcttcgtgaactggccgttctgcggcttgagcctgcttggccccggccgcggcgttcctaggtgtctttgaagtttcgctctcactcactatacaattgctcctttcagcttaaacgttgaagcggaattcgacgatgtcgccatcttgcatgacatagtccttaccttccaaacgcagcttaccattttccttgacctttgcttctgaaccggcttcatccaaagcatcgtaagacatcacttcagcccgaataaatccacgttcaaaatcagagtgaataattcccgctgcttgaggggccttagtaccgcgtttaaacgtccaagcccgggtttccttaccaccagccgtgaagaaggtttccagtcctaatagcttgtaagaagcccgaatcagcttattcaagccaggctcttcaacgccttcagctgctaaaaagtcggccttgtcgtcatcatctagttcggcaatttcttcttcagtttcagcagcaacaccaatggcttgggctccttcttgcttagcatagtccgcaaccacttggaaatacttagagttttctggatcggccatgtcatcttcggcaatattggctacatacagcactggcttagacgttaataagaataagcccttgacgatttgttggtcatcttcgttgaattctagtgaacgcacgggtttgccggcttccaaggcaggtttgatcttttgcaaaacagcgagctcagccttagcttctttatcgctccccttagcagcccgttgcactttagccaaacgcttatcaacagcttctaagtccgctaaactcaattctagattaattgtttcaatatcatcttgcggatcgactttacccgtcacatgggtgatattgtcatcatcaaaggcccggaccacgtgcacaattgcgtcaacttggcggatgttttcaaggaacttgttcccaagtccttcacccttactagcacccttgacgatcccggcgatatccgtaaattcaaaagtcgtgggaacgaccttctttgcggggatgatttcttgaattcggtctagtcgtttgtcgggaacttcaaccatcccaacgttggggtcaatcgtcgcaaatggatagttggccatttcggcgcccgccttcgtaattgcgttaaacaatgtggatttaccaacgtttggtaacccaacgatacctgctgtaagtgccatatcggttattcactcttccttttttaataattaagcttgatcggctttgctttctaatacctttttgagttttttattgaactcacgacgcggcatcatgaccacgtgaccacatcccgtacatttaatcttaatgtcagcgcccatccgggtaatttcccagcgattgacaccacacggatgcgcctttttcatctcgacaatatcacctaaatcatacatgcgcaacgcccctttataaattaattaatttaaatcaatactgagaatttctaaaatccgtgtcaaatcttcatttgacaagtacggaatttcaattttcccttgatcagctttgttcgccttagtttgaatcgaaacggccgtcccaaacttctcttgtaattgttcttcactcgcacggatgtacggtgacttcttgggtgcaacttttttggccggctccttggactcgccgttataacgcgccacgatttgttccaactgacggaccgtcatgttatccttcacgacgcgcttcgctaatggcgctaacttggttttattcttcaaagacaaaagcgttcgagcttggcccatggacagttggcccttttggatatactgtttgaccccatctggcaagcccaataaccgcaaataattagcaatatatggccgactcttgcctaggcgctttgagacttccgcctgcgtcaacttcagcttcttcatcaacgaatcgtaggccgcagcttcttcaagcggagttaaatcttcccgttgtagattttcaagcaccgccacttccatcatttgttcttcggtaacatcacggacaatggctggaatagtcgtttgatgagcgagcttcgacgcccgaaaacgccgttcaccagcaatgatttcatatttattcagcttggcatccggttgtcgtacaatgattggctggaaaacgccggacttttcaatcgagctggcgagctccttaagtgccgtctgatcaaaagttcgccggggttggtacggattggcatgaatatccttaagatctagatcaaccacggcttcttcactagctggttcgttaacatcggcaaacagggctccaataccgcgtcccagcgccttattatctttatctttacttgccatgagcggccaacacttcctttgctagagctaagtagacttgcgcacctttcgaacgggcatcataatcgacaatcgataggccgtggctaggtgcttcagataaccgcacattgcggggaataatcgtcttatagacggcgtccttaaagtatttccgaacttcttcgttgacctgggctccgagattggtacgggcatcgtacatagtcaatagcacgccttcaattcgcaactgtttattaaaatgtttttgtacgagcttgatcgtattcaataactgactcagcccttccaaagcatagtactcgctttgaaccggaatcaaaatcgaatcacaagccgtaaacgcattaatggtcagcaagcctaacgacggtggacaatcgatcaaaatataatcataatcatccttcacgtcatcgatggcatcacgtaagcgggtctcacgtgccatcatcggtgtcagttcgatttctgccccagaaagctgaattgtagccggaacgatatctaaacccttatgactcgttgggataatggtttctttaatgggaacgtcattgattaaaacgtcatagatttcacgttcgatggtcgacttttgaacacctaaaccactggtcgcattcccttgcgcatccgtgtcaattaataaaactttttggcctaattcgaccagactagccccgagattaatactcgtggttgtcttgccaacgccacctttttggttagcgagtgcaattacggttcccataattattgatcaccccttggttgattttttggaatttcaatcgtaatccgatacccgtcatccgtatcctcttcatgggtcttcacgggtaagccggcatcagttaccatcttaattgattttttgatcgtattcacagcaattcgcgtatcgccggtcaacccccgtgcacgtttgcgtttgggcttcggcggcgtttgggtcttcgccactagctgttctgtttctttgaccgtcaattgatcatcaagcacccgtttcaaaaccgcagcctgttgctccacagccaagttgagtagtgcgcggccgtgccgttcgctgatttgtcgctgcaacaacgccgtttgaaccggctgtgctaacttcaacaatctcaacttattcgcaactaacgactgacttttgcccaattctttcgctagcgccgattgcgttaattggttgagttccatcagttcttggtaggcccgagcctcttcaatggccgttaaatcttgtcgctgtaaattctcgatcagcgccattgacgcggtttcaccatcatccatcttttgaatgatggccggcacatctgcccaatgaagtgaagaaatggcgcggaaccgccgctcaccagcgataatttcgtatttctgcggttcgtattcccgcaagacaattggctgcaacaagccgtgatccgcaatcgtagcagccaattcagcaataccagtttcatcgaagacttgccggggttgaaaccggttggggataatggcagtgaccggaatacggacaatttgttgctccgtgggggtcgtggccgcctcggttttatgtttatcacgattagaaccaaataatgaaaatgccattgaaattacctcccaccttacattggtgccgttaacggctgtttcgccggtgtccccggcttgcgtggataccgcttcggtgacggcttcttcttatcaataacaatgatatggcgcggatcagcagtcacgggcaaactaaaggcctcgtcctgaacaatttggccccctaattgttgaacggcgtatgtcccttcagccgtttcagtacgggcattggctgctttcaatgcaatcatctggccgccaattttaacgagtggtaggcagagttcgctcaatactgataggcgcgctactgcccgagccgtcacgatatcgtagctttcccggtgagcagacttcttgccagcaaacgtttcagcgcgatcatggaacgttttcacacccgttaagcctaattgttggactagatcatttaaaaaattgattcgcttattcaatgaatcaacgatcgtcacttgtaactgtgggaacgcaattttgagcggaatcgacgggaaaccggctccagcgccaacatcacaaatcgtgagcggttgatcacgcagcgcaggaacgtagaatgctggcgtgagtgaatcgtaaaaatgtttaagataaacttctggttccgctgtgatcgtggtcaggttgaactgcttattagtcgtgaccaatagttgaaaatacagcgcaaattgtgccaattgttttgccgtcagcgcaatctcgtgttgggctaacgcttgtttaaattcttctggattcattagtaatagctctccttaaaggggtcacattcgtcctctttttgtgaaacaactcaatgtttcacgtcacctcataactttaacgtaaataacacttaaaatcaatgcacagccccgctgttaaaatcgcaataacccttgaaaagtctgcttttacagccatcattgacagctattctagtttgcaatttttctagtcaaattcatgaactgccttgaacatctcaccgttaaaaacgacaccggataaaagtatgacccgatgattcattaataaaaaagaggccagccgaatagctgacactcttacgtttaattcaagattaaattatatcaccgactaccaaacgaacaacccaacgacaccggctgatagtaaggagaccaggatcccagataatagcatgtaaccaacattccgtgaaatcaaatcgttcttttcacgatcaacgattcccttgaaagctccaataatcatcccaatcgttgagaagttcgcgaaggacgttaagaagaccgttaagactgcccggaaatgcggtgcaaaatcgttaactttgctggaaacttcacccatgacaacgaattcgttagtcactaatttcgttcccatatatgaagccatttggaaagcatcacttgggttaaaaccaagtaaccatgcaaatgggaacatgacaaccccaaagatgttttcaagtgataaattgctattgattaaacctaacaacttatcaattaatttggctaacgctacgaaagcaataacgttagcagcaataatcaaaatcaagcgaccagcgcctaagattgaatcacccaagaaagagaagaatggttcgcgagctggtttagcttccttaacttgttcattagctaattcttcagaaccgctcgtttcagtggtggcagtagtttcttcaacagccgcactacctgagattttcgcaatggtatcttcttccggcttaacttctaccggattcaagattgcagcaataatcgcagcgtttaagacgttcattggcaccgccgtcaaaatgaattgaccaggcatcatcttaatgtaagcccctaagatcgatgccgtcacacaactcattgacatcatcgcaatcgtcaagtttcgttgtgccttcatctgcttcaattgtaactgcgaaacagcaagagcttccgtgttgcccaagaacatcatttcaacaacgaagaatgattcgaactttggttgaccagtaatgtaagctaagccccggccaacccatttgataatccatggtaatacgccaatataggtcaaaatatcgaataatggcacaatcaacaagattggtaataatgaactagtgacgaagtccatcgacttaacgttaacccaactagctaacgcaaaggcgatcccatcgtatgatacattgacgagccaagtgaagccatctgccgctgctttaaccgcgtcgacaccgacttgtgaacccgttaagaaccatgccaataagacttctagtactaacatgacaccaactgaacgccagttaatggcgtgcttttgcttggagaataagtaggcaatggcaataaaaaccacaatcccaataatattaactaccaagttaaagaccatgtgaataatccctcttccctatgaatgtaagaaatatgacaaaactacttctattaatttaccatttaatacgcacttgcggtagcactttttaaagaaaagcttaagttcttaattaggccgtaccaatttattgaaaggccccgtccaaatagtgctggtaaccgtgagaattttagttatgtctgcccaatttcattctaaattttagtaattctgctaatcagagatcgaaaatttaggcccatcttgattaaccgttaacttattgtgactagaattaatttattaacttagtaatttatctgagtattctctaagtcgttaagttacaaactaatagcaataataaaacccacacattataatctgtaaaattaaagtatcatgattcaatttacctatatttctcaccgcaagtacccgtaattcaaagtcattgtatcaatcaagggccaatttaataaatcattatcagttaataaatacctcaaatcattaaataacagttaaaaatcaccagttacttggcagataatagacttttgttgttacaacccgggaatcattgagattgactatatctctatgttggttgcattcaattatttttagttaatctttttaaaactttatgccaatatacaaaggagaatttcatgcgtcatttggggaaagtaccagtttggattacttatacagtagcctttattattttaacttgcatcatttatagtccactatttctggacggacggtctttgatttggacagtagatgggatttcacagcatttgccaatactaacagcattccaaaaaatgcttaagggaattggcacacaatcattatttggatggtcctggaatcttggcctaggagccgatcaaatgacgacttttgcgtattacgttgtcggcgatccattcaactacttagtcgctctatttccaactactaaaattgaatttgcatatcagtttctgattttgattcgcttatatgctacgggcctagcttttttaacatttgctaggatatggcactttagccgcttaagtcttttaattggttctttaacatataccttcactgcttttgcacttcacatcggcatgcatcatcccttcttcttattacccctcatctttttcccattattatgttggggaattgagcgagtattcagaggaaaatcatggtggcccctggcaatagtaattgcaatcacggttgccagtaacgtttactttgcttacgtattagcactcgggagcgttatttacacaatctggcgttattggcaacaatatcgtcaaacaaaaacgtatgcacgattttggcaattgatttaccacttattaagcgctgttttagtcggtgtagcgtgtgcagcagtgttagttattccgaccgtcctcgccatgttgcactcgacacgtacaggtggccaatttgccaacggattatcgctctacccattaagttattatattgcgctacccaatttggttttaaatagtgatgggatgccgttttgggtcattttaggtatcagtagcctaacttggttagctattttacattcgttacgtcattttaaacaacgatgggacttaaatagtctactcattattttattagtaggcctattacttccagctgttgcagccacattcaacgttctatcttcgccctccaatcgttggctattattaagcactttgctgttcagcgttcttacaatgcgactcatcgatgactggaaaaaacttgatagttgggattaccgactatttctaggcgccagtgttggcttaattataattatttgggtcgtaaatggttttacttttaacgttagtgcgcgcgacctaatatcatatatattactattcgtcttaatcacctggtttatcgggtcaagtgcgatgcatttaagccgcttaacactgataattggctgtttcactctgctatgtcttaatctaattaatactggctttggtgcaactatgaccagttccggagttgccaatccacaacaactatatcgtggaagtgccacgagttggattaataaatatttggatggtgctcaaaaagctttaccgcgtaatgataatttctatcgaactacattaacccctggattctatgctagaggagctgcttctggaaagaaaaacatctcaatgttgctcggcacccatgatattgcatcctatttctcagtacagaatagaagtattagccaattttcacagtcaattggcaatcaagaggccgatcctaattcaccactaagcacagctgatggtcggacaacaacacgcaaccttctgggggtccgttatatatttgaactagcagaccgttatgaccctaaaaatattcccgtaggctatcatgctttaaaaaacaacgatgggcacgtgcgtatatttaaagatcaaccagtggccggtggattatctaacaaaaccggaactatcgtttttgttaatgacaactttttaccattagtatccacgcaaaacgctcagattagcgcagccaaatatcaacgattaaatgctgttgataaagagcaagcaatgatacaagcgccgattactgataagccaataactggtgttaaacaagtgcaacctcaaaaaatagccaccactgtcccctataccgttaaagttaggaatattaccgacaggccagtcaactcttcaagccgactaagccagaaattagtcactactaataaaaaaattgttaatgacaatcaaaccactaaccaagatggtctacatcaattagttagtgattgtcagggacatcaattgacctatgatttaattcttgatcatcctgaaaagtggcaaaataaagagttatatttagaggttagcggtatgacaatggtcaaacctacgttgaatcaatttttgcaaaataatgcggctaatgccgtatttgctaatcgccccaatacaacattagctaagattcaacagtttcgccaggcacttcatactgattggcaactcagcggttactatttatccgcatcaaccgcttatcgaagtaacaacttttcacaacaatcaccaactaatctttcgaattattcgattcgaaaacgtgttattttaaatttaggctattcaagtcatttacgaagaatcgtgaccgttcgttttagtcaagtgcctgaactaaaaatccatcatgtaaaattaatggcagttggatttaaggggcgctaccagcgtcaaatcaaggccattcaaaagcacggccttaaacaacaaaaggtaactaacaacaccattacgggtcgcactcaagcacaaactgccagcgtattaactacctcgattccatattcaactggttggcacttaacagttgatgacaaaccaactaagactcaagttgttaatacaggtttcgttggtgcaaaaattcccgctggtcagcataaagtcaaattacaatatcatacacccggattacgattgggcgctataatttcgttaattggccttttgcttctactggttagtatcctttggcaatcacacgcttggttgcataatcaatcaaaccagtaagaactccagtctattttctcgtatcaaaatttacacgtaattcatgctttctgatcaaaaaagttcgattcgtcattgaatcgaactttttctatcagctcccattttgaataataaaccaatgatgaactgacttgatgacaactgaaaattcagtcgttaagtcccccgcaaccgcggagtgcccctgccaaggaattctattataccgcgtttagtccgtttgcgaactaattagttgacctgaccattaaatgggactaaactacggacaattaatgaaagggggtgatgctttttgagtaccatatgtaatcttaaagcatcagtctctgccctattcggagcacatgactgatacctttaaggagtcccgaccaaatttacttggtcgggacttttgctatctaaaagtgtgtataaacagttgcaagttgactgtgagtggcttacattaaaagtgcagtttatttggagatatggagtaacgggaaatatgaaagcaacgacaaaacaagtattgacaggcgctacctggctagtagttctgctagcaatgatcggtggtaccatgctttggcaacaacaagtccacaagtcaaaaccggtcaccaccataacagtgacttctactgaacgtattccaatggtgctcttactagatgaccacttaactcacaatcagattcagcaattaactgcccatattcagaacagtagtgccactcagacactggtcaccgccaaaattacagcgacggggaccgtgacatttaaaggacaattgctcaacagtgacaaccgcccctacatacaagtgcaactgcccaagaaccttgattcaaaccgacaaacgcatttattaaagcaactcctaaccgtcgcccgccagcagtttaaatttcgccggtttaaccttgtcagttacggtcgtggcggtcttactgccactaactatgtcgaacacacaacaacaagcttatcaccacaacaccttgtactgatggccaccccatttaacggtaccagccgccaaagtaacaatcgtcgccaaacgacgccggttgccgccaagtcgcaaacggccacactagctaaattgattgcacaccgccataccattgattccaagatgcaggtattgattgtcgctggaaaagccatcaaagctgaccaacccctaccactgcaaagtgccctgactggtcaatctatcttcaagccagtggtaaaggtctatcaacaaaaagtgttgcgctcatggcgcacccaatccggcttactcaacaaccatcaaatcggtaatacgattcaaacgtttataaactgatttcacccgtccaatcgacctagccatcatttttgctcagagtgcttatctaaaacatatctaaaagattaatagccacctttcctgacaaccaacttggtctactggaaaagcggctatttttagctttaattgtgcgatctggtcgtagtaagcctttaacgttaaaagcagccagcttaagtccgctgaaaaaagtttaagttagtgccaaccctgcctggttgagcgcgtcctacaacgccttccagtcgggatagcgttcgaatggcggacatgtgcgtattccgtttctgatgaattggccgtggctattttagcgacagcgactttgccatataactgtcagtctgataatagaattacgactgttccatgatctttatactgaggtattcaaaacagttgatgtcccattaacatttgttcaaagttcttagtagtaaataataatttaacgactaattgcaccagttaggcggtcgttcatctacctttcgagtggcttcccgaaacatgctcaatgccactgaagtctgtgctggctacgccaacgctctgcctaactttgctactgccataacatctgatccggatactccttggtcaaaaactgtttaatagcacgaatcatgatagccgttgaaggagcggctgcctgggttttgttggcaactaaggcaatctcacgattataaggttcggcaaaggaaaacgtgttaacatctccagttagcttccgtagtgctagctgaggcaaaatgcccatgcctaaaccggattctaccattgaaataatagattgatcatcaatcgagaatcgtaaaaagttattagtaacgtggtagtggtccagtgccagcttggtgtcccggtcataatcgctttgttgtagaataaagttcttatccgcaacgtcatcagtcgtgatgaattcaccattttctgggataaaatcagcgggcgtcacacaatagattggatcattgatcagtgaatgcactaataagttctcattgactggcatcgacgtaaacccaatatcgatagtaccgatcttggcccagttggttatttcattaaagttaccttgcatgactgaaatcttaatatcaggatatttatgattaaattcgcgaataattcggggtaaccagttgatacagacactactgaaaccgccgatccgtaccgatccagagtgcaatccttgaatattatcggcaacttgtcgcaagttactttccgtattcagaatctcttgaacatagggtaaaacctgccgcccatcactagtaagttcaacgcctgaacggttacggatgaatagcggaaaacccagttctttttccaactgattgatcgaatgactgaccgcacttggcgtaacgttaagcgtagcggccgcttgatagaatgtatgttgggcaacgaccgttgaaaagacttcatatgcgaagtttgccataatgatttacctctcttaggtgaatttatttcacttattattgaaaaagttgagttttactaattacaagctttattttatcatattgataatcaaagaaaacagtttaagtacaaaaaactgagtgggggaaaattattatgaaaaaattatttgcaaatcgcgtgttaaacaatgacacttccgacctagatgaggtcttcaagaatagtgcaaacccggaaaacatttccttcgctggtggttttccagatcagcacttattccctgacaacgacttaaagcaagcctatcgtgatgctattgaacacgatggtcaaggcattttccaatactcatcaactcaagggttgccggcattacgccaaaaaattgcagatcgaatggcgactcatgctgacgttcaagttagtgccgacaatgtcatgatgacccaaggtggtcagcaagccatcgacctcgtggcgaagctcatgttgaaccatggagatgccatggtcgtcgaaggcccgacttacatgggggctttagccgccttcgacacttacgaaccgacttactacgaaattccagttgatgataatgggatgaatattcgtcaacttcgtaaaaccttgaaagctcatcctgagatcaaattgatttacacgattcctgacttccacaatccaacgggtacgacgatgagtgccaaacgtcgtcaagcactcgttgcccttgccaatcagtacgacgtcattattttggaagacagcccgtaccgggacctccgttatagtggtcaaaatattccggctatcaaacactacgatactgaaggccgcgtcatctttatctcaagtttctcaaagattctttccccggccttgcgaacaggctggattgttgctgacgacgcaatcatgcacgaattggtcggactgaaatccgcaatcgatgttcaatcgccaaatgtaacactggctgctatcaacagctacctagatcaacacgacatcgacgatcacgttgcaactattagtacttcataccggattaaacgtgacgcgatgttagccgcactcgatcaatacttcccgcaaaatgtccactacacccgtcctaatgggggcttcttcatctgggtaaccttgccagaaggaattgatgctaaaaccttgctcaatgacgttgttttaccgcaagcacacgttgcctatgtgccatccgcttgccaattcgcaagtcgcaaggttaaaaacgggttccgattgaatttcaccagtctcgacgtcgaaacgattacgctgggaattaaacgccttggccacatcttacaaccggcaccagtaattgttccagcagcatcgttcgcaccccaattctaacttgacccactcatcatgcgactaaccgtaataattgcgattagtcgcattttttgattacatctgtcagctgtaatgagtggtcgtgatcctgaatattagcactttttatatcaggatccacatcaaataagccgtacgctttacgaccatttatactgtatcagtttgagcacccgcgcttgcgtcgcttttactgataaaaaagggtttgacagtccttctctgattcgctacactaacgctatactagccgattataaaataagcattggtccgtttgcgacactcaatgcttattttttgttaacagcttcattttcggataaactaggagtgttgtgaaaaatttctaggagtgtgaatcatgaagtcatgggttaaaaaattaagcgttgcagtgcttgggttaggtttagcagttacattgaccgcctgtggtagtaacactagcagcagttcaaagtctaacgacctcggattgcaaaaatcggggacgttgacgattggcttagaaggcacttttcaaccatatagctaccgtaaagacggtaaattaactggtttcgaagttgacctcgggaaagccgttgccaagaagatgggactaaaagctaaatttgtaccaacgaagttcgattcgttagtagctggtttagacacaaacaaattcgacgttgtcatgaataacatgtccgaaacggcggcccgaaagaagaagtatctcttctcgaccccttacatttattctaaatcacaattagccgtcaagaagaactcatcgattagtaagattaccgatattaagggtaagaaagttgccgaaacaacgactagcaataacgcaacggatgctaaacgtttaggtgcaaccatcaccccaaccgatagtttccaacagtcgatcgacctcgtctcacaaggccgcgtcgctgggactattaattctcgtgaatccttctatgcttacttcaagcagaatccgaaggctaacattaagctgattgattccggcgatcacattgcctcacagaaaatcggggccatcgtcactaagcaacaccctaagatgcaaaaacaaatctcgaaagcaatccaagaattacgtaaggacggcacgttaaagaaattgtccaataagtattttggtggtaacgttactgataagtaacgtaccattgcccgctattatggcgggatacatagcaccaaattctaatttgttacaggaggctccctatggattcaatctggcacatcattgtcacatcaacgccgcaaattgctgcagcgggtttaaaatataccattccgattgccattatttcgtttattctcggtttgatacttgcgattttcacggccctcgtcaagatttcgactcgtcgtggttggtttttaattctaaaagccatcgctaacttctacgtctggctctttcggagtaccccactgctagtacaactctttatcgtctatttcgggcttccctaccttaaaatcaaagggctctttccaaatggggtccagctcgacccctggactgctgggattgccactttttcactgaacaccggggcttactgtgcggaaacgattcgagcagccattctctccattcctcaaggtcagtgggaagcggcctactcgattggcatgaccaagtcacaagtactcaaacgaattattttgccgcaagctgcgcgagtctcactaccgccactatccaatagttttattagcttagtcaaggacacctccttggccgcttcaatcacgattattgaaatgttcgaagtcagccaacaaattgctgctcaaaattatcaaccacttgtgatgtactccctggttgctgccctatacgcaattctatgtacgattctcagctggctacaaggctacttggaaaagcggacgtcacgttacttacggccacttaattaggaggttgtcgaatgatcaaattagaacacttaaataagacgtttggcgatcaccaggcgttaaccgatatcaatactgaatttaaagaacaccagacgaccgtcatcgttggcccctcgggttctggtaaatcaaccttactgcggtcactaaatttgcttgaacggcccgaacaaggtttataccacttcaatgacgaaactatcgactttactaagccgttgactaataaaacaattctcaatattcgacgcaaaactgggatggtctttcaaggttataatctgtttccccatctcagcgttgttaaaaatgtcatggaaggccccgtgcaagtcttaaaaaaggattccgcgacggctaaaaagtccgcgctagaattgttggcccgggtcggcttgcaagataaggccgacgcctaccccgaacaattatccggtgggcaacaacaacgggtcgcgattgcgcgctcgttagcgatggatcccgaattcatcttgttagatgagccaactagtgcgctagaccccgaactcgaagctggtgtgctccgcgttctactagccctcgctcaggaagaagactccatgattatcgtcactcacaacatggaatttgcccgcgcagttgcggataagatcctatttgttgaagatggcaaaattctgttcgacgggacacccgctgaattctttaagcagccaacgcaacgaattgccgacttcttagccgcgatgacgttcaccacgatttcagacaaagcaaaccaatagcgttcatttgagttaacgtgcatctaactggaaaatcccagtcagatgcacgttttttagcaccccctagcgtctcacgtcaaccatcgatctggcgcattcacaacaaatggcatttagattaatataaaatgtgatttcgatttgacaattgttatttaatcttgtagactagcctcaatatctaaacattgtgatgagatgagtagtgtgattgccacgcaaagcgagccgttggttggtgtaaaacggtcggacagtgatacgaagatggtctctaaatggtattggtgagcattagcaagccagtaacgcgtcgtacccgttagtgtactgagtgaattagctcattgagccaagcgttgtgcacgcgcttggaaactaaggtggtaccacgatcagcagtcgtcctttttcgataaaggacgactttttttgtcaaaaaaatatagctctacgggggtaatcgatatgaaaaaatggctcaaggcagtaagtttaacaattttaggactcgcactaacagtcaccttgacggcatgcggtaattctagctcatctaaaagcagcacttctagcacgagtagtcagctcaaattgcaaaaaagcggcacgttgacgatcgggctagaaggcaccttccagccttatagctatcgcaaagacggtaagttgactggttttgaagtcgaccttggtaaagccgtcgctaagaagctcggtctcaaggcaaagttcgtcccaacgaaattcgactccttgattgctggcctggatgtcgacaaatacgacgtggtcatcaacgatatcgctgaaactgcgcaacgtaaacaaaaatacctcttctctacgccttatatctactctaaatccgaattagcggtcaagaaggggtcctcaattaacaagatcacggatatcaaaggcaagaaagttgcccaaacaacgactagtaataacgcgaccgatgctaaacgtttaggtgcgaccgtcacaccgaccgatggctttcaacaatcgatcgacctcgtaaaccaaggtcgcgtcgccggaacaatcaactcacgggaagcattctatgcttacctcaagcagaatccaaaggccagcttgaaattcattagtggtggttcagaaatcaaaacacaaaagattggcgcaattgtcactaaaaagcacgcctcactccaaaaacaactgtctaaagcgattcaagaactccgtcaagatggcaccttaaagaaactgtctaataaatactttggtggtaacgtcacaaaccaatagccatcgcaatctatttgatagcgtccagttgatagtcacaaaaagcccggaaaaccgggctttttgtgtgtgtcggcgtctttcagcgaccatcttttatcactcattgtgttgctaaaaaccatccgggaccatttacaccattgcttatgtcgtgaacccggtcagctaattcaactgatttgcaatattgaatttcatcttgccatgattgacttccaaccacatatatttggtgttcttaggcgacaaaacctcaatatgtgaatatttttgattgtgattcttcgcgattttttcagagcggctttgcagtgtcttggctagtgactgccacgaagcggtcttgccttgatcgacactttcaataactggcgcttgctttgatattcgcacacgcatggcaccaccattccaactcactttaaccttgccatattcagctttattcgttctgatttctgattgaatattggctgcaagcgtattagcttcccgagcctgatacaaattaaatccaatctcaaagacaatgactagcgcacagataactggtggcaaccaaaaccaccacgtccgtaagctctttttttgatgatgcggctgctttaaagtcgtcgtttccgcgtctttacgcttatcctcagcaactgtcggttgtccactgccgcatttttcacaatactgggcactttggggaattcgttcaccacaaaccacacaattcttcatgtccgtttccataattgccctccgtcataatattatcgataataattaactcagccatgacaattaactgtattaatatttcaatataatgattatatatcgaaatcagtcatttttctaggccttatcagatcagtatagtatcacccttgcgtaccggacagctggtattcgctgagcatcatgattttaagctttagtacgggcctatttcagtcaccgttagcaagcacgttttgcgtttactagtggctaaaggtagtttaccttttatcattattttaatatttaagtttgacagttagtttcacttcactgtatactactcattgagcaatactatacgacgtataatatagcaggaggaatagcaatggccattcaaattagttccgagttattggacgggtgcgttttagcctgccttaaaggccaagattactatggttacgcgctaacgcagcgcttgcaagccgccatctcggtgtccgaatcgacgctctacccagtgcttcgacgactcaagaaaaatgactgggtcaagacttacgatcaggcctatcaaggccgcaaccgacgctattatcagattacgagcgccggcctgacacaattgagtgcgattcaacaagagtggcaaacctattatttggccattaaccacttacttcagggggaggatgaaccatgaacgactacttatccaaatttaacgcgttactcgttcaacttaccgatgatgaacgcgacgaggtcgttgaattttatcgcgaatacttactagacgcggcaatcgccaattatgatgactgcgttgccgaactgggaacgcctaaacaattggctcggaaagtgttagccgattattcgattcgttttaacgaaaatctcaatgccaatacttctaaacggcaaaaatctcaagcaaccgtacgcacgatttggctaattgtgcttgctttattatcaacaccgatcacaattcccgcattaatagctattttagcggtcttctttgccttggccgttaccgtctttgcattcgtgattgcagcgggtgccatcttaattggcgtgaccatcctcgcatttgccatgctaacagccggcatcggtatcttcggccagtcgctatgggtcgcactattctacctaggtagcggtcttgctattattggtgccgagctattagttttaccactatttatctggcttattagcgttattctgcaaggaattgccaaaatcgtacaaaacctataccaccgatttgttaagaaaaatcgggcggaacgaggaggtcaccaccatgcgaaggacaattagagttggcattattttattagtcattggactgattttgaccatgtttggaatcgccaataacggtattcaaagcgtttattgggatcaaggcttccatatcgttcatcataagacgcggcgctatcacgtcagtcagctaaaagatgtcacgattgcaacggccaacaatattactattaagcaaggcacagctgctaatatcacggttaccgccacgcgcgccttaccaactgttacgaccaacaatggtcacgtcactgttacttcaacgacacacaacgccaaaaccgtgggcttcatgttcgataacgtcggacaatttgctgacacgacaataattacggtgcctaaaggaactactattcatcaaataaccgccaaagctagtcaaagtggtaacgtttcgttgcaaaacgtcaccgtcgaccaattgaaaagtcttagtacggatagcgatattaatttaacggatgtcaaagtcaatcagtcgctgacgttgaccggcgataatttacggttaactcgtgtctcggcgcctagtctacaaatcaatagcgatccagatatcagcatcaccgacagtcattttaccaagactgcttcaaaaattataaccgctgatagcgacatccatctaaccaataatcagttcaaagcccttaagctaacaagtagcgaaggtgatattatgctcaataataatcgcatcactgaaagtttatccgctacagccagtgacggtgatattcgaataaccgcgccacggacaaccggtgttaaagctagcactagcgatggggacttgcatattttcaatcatctccagtccgatggcggtgattaccaggtcaaccaatcggcagccgtacaataccgactgacgaccagcaatggtgatattacggttagtgctagctagtccatgctagtactgcacttactcaaattttcaaaataaaaccgcgacttgctcatggcaaatcgcggttttatcgtacttacgtttaggatgctgttgcagtcgtcatttccggacgcccttgaatcgccagcagtgctgctcccgactgaatagactgattaggttctgattctatccgttgataatttttactatttgtcacaatcaccatgaccgtgtcatctaagttagcagcttttaacaccgttgagtcaaactcacctaagagatcacccttttgaacagtttgccccggtttaacgataactttaaagccttgcccttttaatgacaccgtatcaataccgatgtgaatcaacaactcaactccattattggttgttaacccataggcatgtcctgtatcggctacaacactcatctgaccactttgtggcgcacagacttttaccggcccctgttcctgtggcttaattgcaatgccgtcccccatcatcttagatgcaaagaccggatcgttaaccgtactcaaggcaatacttttaccagaaactggtgaaaatatcgtatcatctacaatctttggttgtacttgatcagattttaatatgtccttaggaatcgcaaacatattagtggcaataaaagccactgctaccgtcaataacgagacgaccgtataaatcagcaaatcacgagcattgtaaatatacatcagataagagggaacaacggctagaccatatgaatttgctgccacactcataacactcagtacgccagcacctatcccactggttaaaacggttacaaccaacggcttgaaattatagcgaatcaagaccccgaacaaggttggttctgaaacaccaaatagttgcgaggaaaatgcgccaataaaattagccttagccttttgtgactttgctcgtaaaatcatcgccaaagctacccccagattagcaaagccatacatggcttctaaagtaattaacggattgagcttggtagctgctaatagtgacgtttcgatggcaatcatcatctgatgaataccaactagcaccattaacggataagcggctccaatcaaaaaaccaccaattccaaatggtaagttaatcaacccttcaacaccactaatcatcacattttcaatccagtgtacaaccgggccaacccctaaaatcataataccaaaagtaactaacatcgttaaaaagggcgttaaaatttggtcgagaacgttagggacgtgtttatgaaagtaatgctccagtttacttccaagaaaaccagcaactaacgctgttaatacggatccttgactaccgataactggaatcttgtcaaaaagcataatcgctttcgctgtaccacccgcaactgaatacgcgttaggcagtgaaggggaaacgagcattagtccaatcacaataccgacaattggtgtacctttaaaatagcgaaatgtggaccaaacaattaaagctggcagaaatgaaaaaacagtccccgttaaaactgaaattactgtattaagacttgccggaatcgcggcagatgaagttccaaacaactgtaaaacctgattgttagtcaaagcactttgtaatcccaagaaaagtccagtagctgcaatcaccggaataattggaataaagattcccgaaagcattgccatgaatcgttgcaatggtgacttctgattatcaggagtcggcgtagtcgtcgtttcctgactataaattgcattaactaaatgtaacttttcaatcgcgtcatacacatcgttaacaacaccagtgccaataatgacctgatactgtcctgaaccgaaaaagactcccttaacctcatctaagtcttcaagcgctgctttatcaatctgcttaggatctttaacaacaaaccgcaaccgtgtctgacaatgagtaaccgattcaacattgtcaacaccaacaatatcaataatttttttcgcaagtacctgatagtttttactcatttgaattcacctcaaaaagaatggcttgatatggttccaacgtattgagtcgataatgtgcgtaattatttaatcgaggtcggccattaggtaacgttagtaataaccgttttgcgcttaagttaacatacacctgtacccttcgaccacgttgataagcaatcacttggtcacaatcacaagtaattggcctaaaatcaccgactattaaatcctgatttaaatttgatatttgccgtaacttaatcaatgactgataaaaatgccaaactgaatttgaatctaattgttcgctttgccagtttaccctatcatgtgactgttttggtgtaatccatggcttggcaccctgattaaagccttgattgacggaatcatcccatggatatggtaatcgcgcattatcccgggaacgagcatttacaaaggcaagtgcctcgcttgctgaatatccctcttcaatagcacgatcataattatcgtgactgctcaagtcgttaaacatggtgattgagtcacgccgtgcatttgtcacccccagctcttgtccttgataaataaatggacaaccgcgcaagttaaaataaagtaaggctagtgctttggcaccaatttcattccgataagctggtgtctgaatatatttatcaatactccgcggctgatcgtgattttcaaaaaagttagctccccagccgacattttgaatcgccagttggcttttaaaaattgcgcgccgtaagtccgtcggtgtccacttaactcgtcgataccactctgatccggatgcaatatcaatatctgcgtaatgaaagtcaaaaatcatcgagaagtaaccttttttaccaataaattgtccaagttggtcataactaacccccgaagcctctccaaccgtcaccgcgttagctggtttaaaagtagccgtgttcaattcagctaagaacttttcaataccaggtcgattttcagctttacgtttgactttacctaacccatcaacaccatcaggactaatgctggcaaaatcttgatctttttttatgaatgttattgcatcgatccgaaaacccgcaaccccttttgccaaccaccaattaatcatttgatagattcgtttccttagagccggattttcccaatttaggtccggttgttgtttagaaaagacatggtgataatactcatcctgacttcctggcaataacgtccatgacgagcctttaccaaagtttgatcgccaattattaggcggattgccgtgtgccccacgccgaataatataaaaatcacgatacggactcgtcggcgatttaattgcagattggaaccacacgtgctgatcagaggtatgattgataaccaaatctaaaatgacttttaatcctaatcgtttagttacttccatcaactcatcaaaatcagccatcgttccaaaccgagaatcaatagcttggtagtcagaaatatcgtaaccgttatcaaccatgggtgattgatatattggagataaccagatagtcgtaattcccagctgtttcaaccggggtaacatttggatgattccacgcaaatccccaatgccatcgttattagcatctttaaatgatgccggataaatttgataaaaaacttctttttgccaccaatttttttgcataattactactcctatatttggaatcgattccactttaatcaaaagaaaaaggcttaagcactttttcttttgattaagtctaagcttagatcaatcgttaactcaggtcgttgtaaccggcccaagtgatgtaatagctgatcgaccgccaattgagccattgccgcgaccggttgtcgaaccgttgttaatggaacttgggccaccgccgcaaatggttgatcgtcatatcctatcacggccatatcatctggcacgcgaaaatgttgttgctgtaactcatcaattaccccaacggccacctcatcagaatttgtaaacaccgctgtcgggcgatcaatagggtttaaggacgctaattgcttccccaacgcttgtccatccgcaatcgtatgttgttgtgcgaaaacccagctattgtttacaactaactgctgctcttcacaaaaatctaaataggcttgcgtccgcgaacgtccatgatgcgtactgggaaaatcaccacccgtggcataggcaattcgccgatgaccttgatgatataagtatgccaaagcatctttagttgcctgataatgatttaaactgatcattggaataccaatatcagtagcttcttcattcaacagcaccatctgattagcatatgtcgccgacaattgtgccactagttgttgattttcaatggatgccagaatgacgccatccacttgttgctgcttgagtttatccagaaagtgttgttctgccaacgcatcatcatgagtctgcattaccatcacttgaaacccgtatccgtttaactcccgttccaatgcatcaaataactgtgcaaagaaggggttagagattcttgataccagtacaccaatcgtattagtgctctgcgcgcgtagctgactcgcaatggcattcggggtgtaatccagtttttcaatcgctgcctgaatttgcttcttcttagcaactgaaacactaggccgatggtttaaataccgtgaaacagtcccaacacctacaccagcctcagctgctatttcactaatcgttgtcatttaagctcaccccctatttggaatcgtttccataattaatataacgacctttcaagtaattgtcaagacaaattggtttttcaaaatgaattcactaaaaacgtttgcccttaaaacatttagtccaccagtaaaaaaatggaagtatcctgccatttcgataacttcatttttaacattccagccaaaaaaatattccaagccagtgtgcacctgacttggaatattttaattactgattcagccttagtaatcgctataacgatgcttgatagacatcaaaccacgtcaataatagcgacacaatcaagataccaagcatcgccaccgcgtgccaccatttatttcggacaaatatcgcaatatactcacgaatgatcgcatccggtaagaagaatcgcgccgtccgcgcaccaataccatccgcttttagacctgcttgcttggcaaacatcccggctctaaaggtatggtaattatttgtaacaaaaatcgtgcgtggatttttaacagggccctgtgcaatcaattgcttactaaactgcatattttgcaaggtcgtcttcgattgcgtctccgcccagccatccgttgcaggaaggccatgcgcaatggcgtattccagcatggcttggccttccggaaccgtttcatcaccaccctgaccacctgagaaaatcatcacggcccgatgatgcgtcttgcgttgttgcttctgataaaagcgcagtccacgcatgattcgttgccctagcaatggcgagacacggtctccatctaacaagccagccccaagcacaataatataatcttgtcgcagacggggccaattgaattgataaatcgtcagcatcgtcagatagttataaaaccaaaaaccaaggtaaaaaatgaccagattcggaaataccgtcaaaaaataactcacgggctgcggcacatgactactcaacagattgcctaaaaatggcaaaatcagaatggccagtcccaagtacaaggtcagcatattcgccaacgtatgactctcatgacgccacatgatccacgcattccataagagcaagaaggcttgtaaggtaaaaatcagcccaatcaacaggatcagcaacacaaacaacgtcccactgataatgatcaaccagtggatattgctacctaaaattgtaatcgccagcatggttaaaaacgaatagaaaaatagcgaaaaccaaataccgttacctaggcgaaccttatcgcgatgataacgccaaccaaaaatggttccaaatatgagtggtactaaccagccccagtaaaacattgctggaactggaacccaaaccgctgcgtcattcacatcaatacccccgcattaagttttatttcagcttccatcataaaggactccccgcgggactgcaatcaggagtcattacttcaactgtttttgttcattatagaaattacggtaagctaaatagcacgcaatgattgaccccaaactagtcgctgataagagcatgaacgtgaccataatttgatacttaatggcccgtactggatcgacccctgcaaagatcaaaccggacatcatccctggcagactgactagacccacagtctttgccgaatcaatggttggtgacatccccgtacgaatcgcctcacgcacgatggcaatcgaagcgtcgagtagaccagcccctaacgccaaccgttcaagcacaccttgccgctggtcatgaaactgactattgaggctgcgataagccagcccaattgcgaccattgaattcgacgcaatcataccagaaatgggaatcatttgcgatggcacaaacttaatcgcaccagatagcacgaggacgccgagtgttacccccgtactaacaaaaatggctaataacgaaatggctaatgcatggtcaatccccggcccccgttttttcgcattccaagccgcattgaagataatgaagcccatcatcgccaacgttagccacaaattgttgactcggaaaatatactttagcaagtaacccacgataaatagttgtacaacagcccgcacgacaccaatgacgatgtccttatccaagccaagtttctgccacaaactaattcctaacgcgacgagcactaacattgccgccaaaaatagcgacgtattattaactgctaaattcatgcatgtacctccaatctgccagcaaccactttcgctaattgatctgccgcagcaatctctgtcgcgtcatgagtaatcatgatcgttgtcacgtgatcctgctcatttaactgtcgtaaccaggcgtgcacgatttgcttattattttcatccaaaccagctgtcacctcatctaataacaacacttttggtaagaataagatgttgcgaatcagcgcgacccgctgccgttcaccaccggaaagctcggtaatcggctgatgcagggttcgttcggacagcccaacattatttaacgccgttaccactcgttgcgtatccatgacttgcttacgaatttggtacgggaaagctaagttatctgccaccgtctcaccaaatagcgtcggctgttggaaacaatatgagacttgccgccgatacatgattgggtcatagctttcaatcggctgcccatcaaaaatcaaggtcccacttgttttagaaatcatggccgcaatgatccgtaataacgtgcttttcccaccaccggatggtcccgtcaatgtaatatgagccccagctgaaatctgccaatcaacatcatgtaaaatatgttgatcagcgatttgataattaactttttctaaactaatcaatgaattcatatgcccacccccgattactaatttagaatcattataacctgactgttaggcgactttcaaacaatcctcctcagttatcctgtgtctttccacatgctataatggaggttaacacagttcacagaaaaacgaggtcaaaatcaaacttatgccacaatctaatcattattcgcaccaatcccgatcgcacaatgatcggcgccgacaacagccggatgaaaaagtgcaagcgaccgttaacatcggccagcgttttccactgaccattcggcgtttaggcattaacggtgaaggtattggctattacaaacacgtcatcaccttcgtcaagggcgcccttcctgaagaagtcgttgttgctgaagtaaccgccgtgcacccacgttacctagaagctaagattcgtagtattcgcaagcctagtcctgaccgggtcgatccccgcgatgcctatgcgggcgaagtcggtggttttgaattagaacacctcgactacccggcccaattagcctttaagcaagatttaattcgtcaagcactcgaaaaataccgcccagctggttatcgacactatgatgttcggcccaccattgggatgactaatccttatgaataccgcaacaaagcccaatttcaagttcgtttaattgatgggcacgtcgctgctggcttatataaagaaaatagtcatgacctagtcgacttaccgacctgttcggtgcaaatgccggcgacaatgacagtcatgcgtcaagtcgtggcttggctggaggaactccaagtaccgatttacgatgaagaacataattctggcatcgtcaagacaatcgttgtgcgtgaagcggccgccactggtgaaattcagctggtcttcatcacaaatacacccaagttaccgaaaaagcatcaattattgatgaaaatcgctgaaaaactgccaatggtcgtgtcggtcatgcaaaatatcaatgctggtaaaacttcattgatctggggtgaccaaacaacattactggccggcaaaccaactattacggaggagctagacggcctagtcttcgatttatctgctcgggccttcttccaattgaacccgcagcaaaccaagaaactctatcgcttagcacgcgaagctttgaacttagcgcctaatgagacgctggtcgacgcttattcgggcgtcggaacgattggtttatcactagccgacgtggctaaggaagttcggggaatggataccattccggcagccgttgcagatgccaatgccaacgcccaacgcaatcaaatcactaatgctcattacgaagttggtgaggcggaagtcttgttaccgcaatggttagcgagcggttttgcgcctgatgcaatggtcgttgatccaccccgtactggtttagataacgtcttaattgatgccatcttacaaagcgcaccggaaaaactcgtctacatttcatgtaacccatcgacgcttgctcaggatttacaagcacttacccgcggatatcaagtcgactatattcaatcgatcgacatgttcccacaaacagctcgttgcgaagccgtcgtccgcttcacgaagcgtcattaatttgccactcactgccaatcatatgagggggaatcatcatggcagctactgatagtcaaattgcattaacgatgacctttacgttacggccaccattcaagactcatttcttactattaaaagattacgtggcggatgttcgtatcccggctcgtgatgggatgctaacgacgattattgccaaaaacattccgctatcaccggccctagagcaactaaaaacgatttttgatgatgtccaaaacccagtttactggcgcttacacgaccaagccgttcaggaattcttcagtgcgcatcctgaacagcgaccggtcctaccaatcgacttgctgcaagtcatgctcaatacattatctgcccaaggtttgtccgatcaacaattaatgcacattatgaaagacgtttttgaacggctacaaaccaatgacttcaacggacaggcaccacagcgaattttgacgtcgttgaataataagtaaacgccaccatttatcgctgacttttataaattaggattagataacaccaagttgtctaatcctattttttcggacataaatcaatagcggtgaaacttcattagtcacagaaattcgcactaatactcgtttttatttttcttagccattcattaaatgtcagcatacgaaaattgtcttttcggttattggaagcaaacttgttgactttgaagttacatgtgataagctaatcactgtaatttttattgctacagcaatttgaaaggatgttttaattatgaaatacgccatcactgccgctactggtaaatttggtcaaagcgccgttagtacgctgaatgctaaagttggtgcagaaaatgttttagtaattgctcgtaatcaggacaaagctgctcagctgtttcctgataatccaattcgtaccgggaattacgatgatgtcgactcaatgacgaaagccttcgagaacgttgaacgcgtgctcttcgtttcatcacaacctggtggtcccgttgaccgggccaccgctcataaaaacgtcgtgactgcccttaacgccgctcatgttaaatttgtcgcctacactagttttcccaacgcacaggcagcagtcagcgccttagccaatgatcatcgggccaccgaaaatgccataaaagcgactgatattgcgcacagttttcttcgtaacaactggtatttagaaaacgaaatgggcttcttacaaagtggtgcccataaccaagaaaccttgtactgggctaataatacagctggctgggccttggaacgtgaatatgccgaagcggcagcaaccgttttgatggcagatgtccctcaagaagtgtacgaatttgctgggacacccctcacttatgccgcactcggtcaagcactccaagaagcaactggcaaccaagttaagattacccaagtcagtcaggatgcgtacgtgcaattccttgaaacgactggtctaaatcatgataccgctgctttgtttgcctcattccaatccccaatcaatgatggtgcgctggctgaaaagtcagccgacttagctcatgtcttgggacgtcaaccattggaagccagtgtagctattaaagaaatcttagcgcgctaataacgagctagctgtaagtttctcttaaatatcttctacaatacgaaaataggaagttcaacgaacatggcgttgggcttcctattttttaatgattcgtaaatggccttttaattagcgcgtaacatcagcaaaatactgagctaaggttagctgaataccattatgattattatcagttgttactatgttcgctgcctctttaacgggttgtggcgcattagccatcgcaacaccaatccccgctgtctggagcatcgcaacatcattaaagttatcgccaaacgcaatcgtttcagcaggggtaacttgatcatcctgtaataatttcattaatgcggctgctttagttacgcctgccgcaacgatttctaaataagtttctttcgaacgataaactgctaagccgctaaattcatcacggcttaatcgttgttcaatcgcctgaataatatctggatcggccatgatcatcattttatgcactggcgtcggcatccgttgcaaccatgtgcccaaatccgtgacatggggtgcataaccaattcccgtcgcttcctgctgttcccacgggccattagtagccaccaaccagttattattcgaataaatactaattgaggcagctggccaatcatgagctactaccgtttgcacagcttgtgctagtttagggtcaacggcttgctcttcaaaaacagttagtcgatcattcacatcggtcgtagccgttagcgcgccattataggcaatcatggtcgaattaattcctagttgttgtgcaattccaaacatccccttaggcgaacgtgctgaggccaacaccatttgtgccccccgtgcaaccgctgcttgaactcccgtaattgtagccggtaataactgtccttgactgtcgactagggtaccgtcgatatcacttacgattaatttgatcattgattttcctccgttaagttaatcatggctatgctaagcgtagacttatattatgtatccttatagattctactgtagcatgaatcaagtcataaataagtattccagaccatttttcattcatagtaaagtaaaagaaccgataacgttacttgttatcgactctttttacctaaaatatcaaatttttggccagggcgacattaccaatcgttgcagaaccattattagcaattcccgttaaaacaatcaaatgatctaagttcggtaattcaacataattgttattaagctgctcaacgtctcttctaatcactggaagttcagtttcgcttactactgagccaccaataacaattctttcaggcatgaaattaagatatgcatcaaagaccagctgtgcaatataataactgatcaacttaaatacttcattggttcgcttcaattgttcccccggtttgccagttcgagcctcaattgcgggtcctgaagccatgccttcaaagcaccgattttgatgatatggacagacacccttgaagttatcgcctgacataggtatgaccattgtatgtcccatttcaagatgagacataccacctatgaaatgattatcttggataacaccgccaccaatgcctgtcccaatagtaaagtatactagtgaacgcactgcttgtccttgtccaatcatatattcaccataagccgaagcatttacgtccgttgtaaaagtaattggaattttcaaagctgccctcaacatctgtacaacatccgtatgagaccaaccagcttttggtgtatttaaaatctgaccatatgtcggtgaatccaccttaatatcggctgggccgaaactcccgattcccaacgcatcgactggatttttcttaaaaaatgaaacacaggctgccagcgtttcatttggctttgtggtcgctactcgttgtcgcttcaagatacggtagtgctcatcagtaattgctaaaatgaacttagtccctccagcttcaatacttcccaaacgcatgagctatgccccctgattgtgtatgagcaaggtaaccatatcataaggctgaatcactaattgttccgaacatggttgagcctcttccagagcatttacctgaatgaaatgttgttttaacaagggggtcaaatcagcagccacaccagattcatttgccaaacggataacaaaactatttggcacagtataggccggatacaacgcgctaattgtgacatgtggatcgagtttcaaaaatgactcgcactctgagatagttggtaatgaatcatcaaattcaacatcccaaattttattgtctaatcgatttacaaataaattcaatttttgtaattgataactaacatcgggtgctaaccacttttcagcaattattgccaatttattttcattcaattgagacgtggaaactaacccaaactcaaatgtatttgctcctaattcttcggccaacggcgttggtgtcatctgatgtccaatactagttgtatcgcctgaagcacgacctggtcgccacagtaaattaggcttaccaagttgaccagtggttgccattaatgtgacataaaatgctttctttcctaactcgtattccttcattcctttagcaattaaatacaggccatcgctagccccttgcatcccgacaattttatcaaagttataaaggttaaccggtttttcaacaaattcttcttcccaattttccgcaattggtaaattacgtgttctttgaaagccgccttgaacttgcgcaactgcagtgtcactttcaattgctgtattaatttttaaccgtaatcgatgatctagaacctgattatcgacagttaaacgacctgccaatacattgtcaccatcagttaaagtcaacgttaattcaaatgcgacatcgtgcagctttggttcgtgactaatcctgtcagccaagccttctggtaactgccacttgccgcttaatcgcagttcttgccttccagctccaacataaatggctacaacgccggctaaaggcaagtcaacctctttgtcgcctcgaagcggtgaataatcgtacgtatcaccatcattacccgaatctacaatactaatgatgtttttgtaagttttcccattagtagttgcctgaaagttgccatcgacataattcactttccaactttcattttggatagccgtttgttgctcagactgtaattctggcaaagcttctgcaccatccttaaagtcaattacttggtagcccaacccatcaaactggactgcaacttgtacttgtaattcatagtaaccaggctcgtctttaaattcaaagcctttagccgtttgttgcatgatattttctcgcttagccacataatttgcacttaaaatagttgcttgatatttttcatcaaacataatgtttttcgatgatgttaagaaacggattttcttatatccattgaatgggcgtggatcagtattgaatactagcacctgattggcatccagtttcaaccgttgtgcgattcttttcttgatatagttttcgataccgtctgcaatttcaaaaccttgtttgaatcgatggtcaatatcaatagcaacattatcagaaacactgccacccaaactgtcatgcggttgacattctagcaactttttccaaagtttcaaaataagacccttagacacatcgataccacatcttttggcgatgaccatcagtggctcaacacgtcgtaatatttgctgttcgagtttgaaattctgccgtttaatgcgcgaacgtactgaaccaattgtccgatgaactctagcataagttggataccgcaactcgccttgataatccggtaaatcgttgcgttgtcgtaatgttcgcataaacttcggataattgctgatcacaatctgattatgactatatttatttatcttactaatagtctcagatacgttatgaataatattcatttgatcgattcccgaaggcactaggaccgaattattttgaccctgttgactttcaaaatcaattcctggatctagacggtttgcaacgaactcttgtaagtttttcttcgaatccaatgcgatttgaccagtatagtaacctaacggaaaattagcagcatagacttgactatgacctagactgtgccatttaaaataaacagagtccatttgtcgcttaaaattagtgccccgccaaaaaataaagtcattaatgccaacttgatttaagagcattggcaattgcgaattaaatccaaaagtatctggcaaatagccaatcatcattggttgcccatacttttgtttggtatcgttgatgccaataactaagttacgaataattgattctgcatcaggtatcatcgcatcagtctgtgtataccatggtccaacaaataattgattacggttaattaatttctttatccggataacatcttcgggatgcatttcaacatactcatctagtattgatgtctgtccgtctaaagtaaaattagcttcaggatgcgtttctaactccttcaaaacatttgagaacagctgatcacttagcacctgtgcgtcctcagttgtaaaataccattctcgatcccaatgagtatgatttacaaaatgtgcttttgtcataaatgtatcgctccctgttattttaggtaacaaaagccgcactacggctctttaaccattatgcggctcgttttagtcaatctaagcttcaaaattaatgttaatgtcgtcctcattatcatcagtgacttgttcttcgctctgtgtttggttaaagtccacagccaatggtgccagtacaccgataatcgcagcgcaaacaattagaccgattaaataggcccaaccattcgtaatggtgacaaatccataaaccccaccaacaggaggaatcttagcctgagccccaagtaaaatcgtagtcgccgaaccagcagcaccagcaatcatattaattggaattaatttcaacgggttaactaatgtaaacggaatagcaccttctgttattccaataaatcccatgaaccagtcgcttcgtccagcatcaagtaattcatcagaaaaacgatgcttaaagaaagtcgtcgcaaatgcatatcctaagggaataccagcaatagccacattaacgatcattgcaggggtgtaaatcttttcagctaataaaacgtttcctgccatccatgcagccttattaacaggaccgcctaagtcagaaccaatcatagcgcccatgataactgctaaggtaatagcacttacaccgcttgtactcatttgtttaatccaggcaacaagtgatacattaatccaagtcagcggttgcttcaaaatgactcccatcaatattgccacaaccattgtagatagcagcggtacaacaactaatggcataatagattcgaacttttcaccaacatgtaacttattgtgacaccaacgtgcagtataaccagctgcaaacccagcaaccaaggctcctaaaaatcccatattagaactagatgctaatgagcccccaatgaacccggcggctaaagctggcttatcgccaatagcatatgcaatgtaaccggccaaaactaaattaactaagccaacaccaatccaaccaacggcttcaatttgtcccatataaaaccaaaaaccagttttatacgcatcaaaacttgtaattccaaaacatagacctatcaacttaggaactgcaactacgagggacccgccaataacaaccggtaacatatatgaaataccagacattaagtagcccttccactcagccaatattttcttcataactcactcctccattcttcattaaattcatcttatttaacacgagcagcaaccgctttgctgaccttatcaataacagctttcggctttttaatacacatattaatatcaactcgaactgctggaatcccttcaaatcgatccatcttttcaattttttgatccgaaccaatcaataaaaactttgcgcttttcgcctcttcaactgtaatttcatttttaagtcccattgcaccctgttgttctactttagcttgtaaacctagttcctgcgctgctttttctagcgctttcgccgccattggtgtatatgctaaccctgctgggcatgatgtaattgcaacaaaatccatatcagtcatcctctttttataaaattttttccgaactattggttaatacagtgtaaacatcctgaactgtttgactttcaagtaatgcttgacgctcacggtcatccactaatgcactcgcaaagttagctagaatctgtaagtgtgcctgctcactattttttggaactagcatagcaattacctgattaactggttggtcatcaaatgtcggccaatcttgaatgcttgttgtagagcgaatgaatagtacagcaggttgccgcagatattctgagattgcatgaggaatcgctataccgtcctgcattcctgttgaagcttctttttctcgttgatacagcgctttcaaaactgcatcttcgttatctgcaaagccaagttcaattgctttatgtgcaataaagctaaaaacatcctcacgtgttctaaaatgttcttttaaaaaaatatacttctgtttaaaaatttctgtcatatttgcatttccccttcactgctgtgctaatgtatcaataatttcttgagcattttgagcctttattaaggccgtcattcgctgcccatcttgaatcaaattatagaaataactgtaaatatcatccatttgtgtttcaaccgtgcgattcagggctacgaaaaatacaacatggacattttcgtgatcccatttaattccctttttcgacgtcatgattccaatcgttggttgcaaaacatggtcgatatcaccatggggaattgcaaatttatcgataatggtggatgcaacttgttcacgtgctaacgctgaattttgcatttgattatcaacatacccatacttttctagccgatcagttagttgaataatcgccatctttttttcagttgcctttgaatttgtgataataccgtttggacttaataatttaacaaatgcgttccgcgtatacttttcttgacgaatatcttgacttaacttttccaataagttgagttcttggtcattcaaaaacggactgacttgaataaccctcgtaccgctcatctttaacgggatagtcgaaataataatgtctgcagtcactgttgaagtcatcaactcattcacagacaaagtgccaacaatctgaacatccggtagtttgtccatgacacgttgctttagtaactccgccgtaccataaccagtgctgcatacaattgcaagctcaacatctggttttaagacctttcggcgctcaatgaacgattcaaagtgcagtgctaagtatgcaatttcatcctcagttagctgtaaatggtattgcttttcaatcgccatcgctaatgctagtgcttgatcaaaagcgacgggaaaatacgttttaacttgattacaatacggattcgtaatactaatgccatttttaatgcgaaccagcgccggacgtaagtgtagcgttagattacgtaataattgattatcataatccgttagcacgctacgtagccagtcgactatcgttcgttcaactaagccacttctatccagatcaatgtacccatcctcaatggccgcgacatgcatatttaaataagcaacttcttcatcgggaatttcacacttgaaggccacgataagcattttaactaatttgttggtactcggagatattgccatagtgtcaaaattctgtgtcgtcgtttgagtaataaactcgccattcttaattcgctgaatcgcaatagttgtatggatcagtaaagactcatattgatattcatttacatcaacttttaaaatcttcacaaatttattcaggactttttgcatctgatttaaggtttgtttattgacatatcgtttcagggactgtggcactttaaatgtgcgtgtcattttgccagtctgttgattttgcttaatctcttgtccccaatatgactgtaatagctgaccaatcactcgacgaacatcactctccgaactgttgaatttaacgccttctgtagtggccgtcagcttcaacccataatccatttttaaaacatttaaatcacgttccaacgtactacgactaataaagaagtggtcagcaatatcatctaataacactggtttagattgctgtgtcaagaatgtcataatgctaattctgcgttcttgctcactttggctattatccttcagtatcggaaactcagccaacagtcccttcgtattaccactaaaacgaataccctgtcctcttttcctaacaaggtgtacaccttgttggttgactaccttttccacctcattcagatacttagcaatcgtcttacgagatgtgcccgtatactccataatatcttgatagtgaactatcctttttgacaatatcaactcaataatcattcgtgtaagagttgctggtgaactattcggcgccaaatttatcactccctaacttttacaattcatatgataatgtaaccgtatacattatttaagctcataaaagtacacttgtagctagtgtacctttcataagttattattctttgtgctgtcggccatatacttgaagattgctttagaagtttaatctcgaatcctattgtgactaatattaccccgattttgcgcgttatcttacaggaagacaaatcatttactgaattaattaactgttgatatcaatcataaaaaagcagcgtgatttcattatcctgaaatcacgctgctaagactatccaattacaatattcctcagaacagtctagtattaactctcattatcaaatggtgcctaactatctggtctcgaattatccttcaattcaaacttaactttatcccccacgagtttgacaaatagttcctggtcaggctgaggatcaaatggtcccaagtcgacaaggatctgaccattatccgccacttcatatccttggtaacgatcggcaagcagatgatagattgtttgggctggtcgcatccgctcatccacctgagcggccgccgccttcaaggtataaccagtctgcaataaattactcatcgcggctgccttgataaccattttcattgtatacacgcgagcctggcccggctcatcctcgttcttaggaataatgtacccctttttttgccaataccgtagttgtcgtggcgagacaccagtcattctgcttagttcactaatgccaatagttaattgtcctttatgaaaaagctcacgtaaatctgcacgcgtcccgttagtcatactggcgactcctttccaaagttgctattgatataaattatagcatggaatttcgtcgcgaccattaactcgcttggaattttccgtgattaattaacttttctgataatttgtttgtaagtaatccagcaatgactgggcgggacgatccataatcagctgataatcatcacttactgtggctaatagtccgcgggcgccaccggcatacatcgaggccaacattggcccctcaccattctgattgtacatatcgctgaaggcttgcaaggacactggtcgatacccgattggttgcccgctcacctgactaagcacagtagcgagttccggcatcgtgtaagctcgggactgtgttaacgtatagattcgaccacgttgtaataaatcaggcgttgtggcgactttagcaaaagcggccgcactatctgcctgactgatgaagctgagagcctgatcagccattggataaacgacgttgtgccgttcaattaattctggcaaatatggcactaacggatccgcgtaaagcgcattccggacaatcgtatagttaatatcacttccagctaatcgccggggcacgtaaccataaaatgctgataatgcaaatggattattcacctgatcggcaatgaaacccatgactaggaaatgatgcacattcgcctgttggactgctgctaagacgttctcaaattcttggacccgcgaataactatcatgacttttactaggaatatagatcaggacatcactgtcttggaaaaatgcgcgtaactgctctggctgctggtaatcaatagccgcaacatgcaaaccttgttgttggtatacctgggccttactgagtgtatggacccctaaatataattcagtggtggcgactaacggtctcatcgcggcaacaatctgttgtcctaaatgaccagtggcacctgtaatcgcatatttcaatttaactcgccctttcatgtaactttattagttacatttaactaaatatcgatatatttgtcaaataaagcggccgcttatgatattaacgtcacccattgccgccattaattcggaaacatttcgtcgctacatcgttaaaattaaatacacagaaagggctaccctcattacaagagcagccctaagaaatgcttttctaaaaatagttaagccctaatttgcaacctgttgaccaaggtgcttcttttcaggcgccttcttaacgtttttgacatcattatcggaaaagccaaacatccacgttaacgtaaaggcgacaatcaagtcgatagcagaggcaatcaagaaaccgtagaaactaaaatcaagccccttaggattgatgaaggaggtcacaccgatcaatgatccggcgaagccccacatgttaacgttaaacagtccggtcaagaaaccgccgacagcaccaccgatacttgcggtaatgaatgcccggccgtatttcagattgatcccgtacattgcaggttcagtgaccccacagaaggctgagattgttgctggccaagcgagttctttaatattagcaaacttagacttcagcgcaattgctaagaccgcaccaccttgggcaaccatcgttgcggaaacaatggcattcaagtaactgtgtccagttgtcgtaatatcgttgacaacaattggaataatcgcccagtgtaacccgaagataacgagcacttggtagaagccaccgataattaagccagagatggctggactgagtttgtaaatcgccacaattcctgcggccaatgcgccagacaaagctgtaatgattggcccgaggatgataatgatggctccagaaataatcacaacttcaaacaacggtacgaagatcatccgtaagactgtcgggatgacccgcttgagccatggttccaacttacttgctaaccacgcccccgcaatcatcgggaaaatcgagtaggtataggaggcaacgtgaaccggaatgccaaagaagttcgcattgattgccattcccaataagtgacccgtaacctttccggttgttgccatactaacaattgctgggtatgttaagaccccaccaataattcccatgataaccggatcagcccctaacttcttggctgcggtgaaaccaacaaatatcggtaagaagtagaagacggaatcacccatcgcattaataatcacgtaggtcggcgttgtcgcagagacgaggttgaagttctttagtaacgacaaaatcccctttaagatcccagaagctgccaacaacccaatcactggaatcatggaccccgtaataacaccaatcaagctgctaaaaccgtgtttgaccttctgccacggcgtcattttctgccacgctaaccggttcgcttccttctccatcgcaacagccgaagcgtcagcatccccaaagcctgcgcctagttgacccacgattgcatcatacacgtcggtcaccgttggcccaatcaccacctggtactgaccacctgcctttgcaacatcgataacgccctttaggtttcggattgcctcgtcattggcctgcccttcgtcctttaagtaaaatcgaacccgggtaatgcagtgaatcacgcttttcacatttaccggtccaccaacttgagcaatgatttgagtcgccaattcatcgtacttgccgcccttacccttaaccaccggtgcttcggcaacgtgttctttcaattcaacaacagcaccgacgaccccggcacggacttcacccagttcgggcgttagtttggtaaccatatccgccgtattcgttacggccatgattaccgtggtatccttgttcgcactagtaatcgccgctaaatccatcatggccactttttcgccggcctcgaccgtatcaccaacttgcacgttaactttaaacggtggccgatctgctagttcgaccgtatcgataccaagatgaaccaacacttccagaccattgttccccgtaaagccaatcgcgtgcagactcgctgcaaccatcgttactttaccactgattggtgcaacgacctggccatctgtcggttcaataccgaatccttgccccatcatcccttgtgaaaacaccggatcgtgaaccgattcgagtggcactaactgtcctgcaaccggcgttaataaatgcacttgcttcatagcgattctccccctttgactaatcaataatcgcgttgttaacaaactaatttcggacactggttgttataaaatcactaataattgccaatccatccagtgaccaactgtcaggccctcctaactaatcaagtaacgtccttaaccataaaagcgctttcttttataaacataataatagccgcccctattaagtcggtcaataaaacccgattaaaataaggcggttcacttgaatttaggaacttatttaattagtttgccaaactttgtgaagcaagtgttaatcgttgcgttgcaagaaaggaccgttcgaaatcagccgtcgttttgacctgtttaccgaaatcaacaatcagtgcgtgccactcccaagccgtcgttaaatcataatgccacgcctgcataatcagttgttgggcctttaagtagttgctcggtaacggttggttaagccagccgaataggcgccgcaaatacgtgtcaataatgatcgttggctgatgaaaaacgtacatgctaaagtagtcagccgtttcatcgccaataccgcgcagagcgattagttcacgccgcaattgttctgctggcaaggctcgcatcacggtcaagtcaaaatcatactgtccacaccacgctgctaaagcttttaaagttggaactttgcgcgtatagaagcccgcgggtttgactaaagtcgtcagttcagtatcagtcaatgctagtaaccgccgaggctcaaagtcagtggctgcttttaaattagccagtgcgtaatccacgttgcgccagttggtattctgaacgagaataccgccccagagaatctcccaaggcgtctcggcaggtggtattccggcttggagccagtgccggggccccatggcagctaacatctgctgatacagtgtctcaatggtcattgttagccctcctcacatgaattggttaatgttgagaccaataatttgatcttacaaaaaaatagtcgtaacggcaaaacatcaatccgctacaactattgtttacgcttgtttattagtcatctgccaccgtactgcgcttaacagctagcacaatgtcagccttccgattttcaggcttgatcttttcttcaaagtccaattcggcatccttaaacaggttctgaatctcagtattaactaacgacaagtcgcgtgaatccccggcttgttggcgaatatagaccacatattgatctggtaattcttcaagatcatattccacatcttcgtcattcaaaataacataaatcaacttacgttctttgttcatctgaaacttccccttatcaattattttatccgaattagtcgtttgcggctaactggtgagcaaacttaaggtagtcagccacacaatggtctaaccactcaacgaccttattgtccgtaaggtccccatcggcattcatcttgtcctgcaccgcgctcaacaagaattcatttccaggcagaatctgcatcccaactccgggtgaatctaaaacttgccgtaaatgactctgcgctcgcactgtccctaagggtcccattgtggcccctaaaatcatagctggtttcccaattaacggtcgttcaacacgcgatagccaatcaatcgcattttccaagacacctggatatattccggtgtcacaaaaatgacgccatccgcgtccatgaccgtctgcttaaaggcttgcacctctgcgggggcttctagctcgatatcctgatcataaaaaggcaacgcgcccaagttaggaatcgtgacatccagttgatcggcataccgtttctgaacaaacgttgctaacttacgattatatgaggaacgtcgaatgctaccgacgagtgcgataatcttcatcgtgtgaaaaactcctttaagttgtaattacttttagtataccccttttttggtaaatagtcggaaccggttacaaaaaatcagctgctttcatcaaaattttaatcttaactgctgaatattcagtcagtttagcaattccagtccccatccgcgtaactgccattatcttaagtctaattttaaacgaggtgaggcattcattagcaggccagattatttcttgctcatagaaataactaccagacataataatcgaggcagtgctgtatcgccatcacaggattaataaactttcacaaatgtttcttaacttttttcaaaaccaaacgtccattgttagtgtgatgaatagagtctgctatactattgattagagaaattgattggggggttaatcgtgtattatcgtggtgaagcacttgactttttgaatatgctacatactacaggtgccgcgccattaatgcgttcgcgaatcgttttttccagtcagatcgacgtggaacgcttaaaggctgccgtgctcgcttccgcacaaatcgtacccgagattttcggtcattatcaagctgaccgtaatcgtttcgttgttactgatcaaccagtcaaccaagttattcaggaagttcaaagcccgtatagtcctgaaaacactgattttgattttacgaatagtccgcaactacggttatttgtcattcatcacggtgactacgatgtcttacaaacctttatgagccacctactaacggacaatcgtgggtttaaagaatatctgtacctgctcgcacaagcctacaattatgccgatctcacgaatttgcataatgaacggcgactacgcccagttatcactaagttgcaacgtcaatttgcacggccacacggtcatgcacccattgttaccggtatggttaaactaccccattatccgggaattaacttgcggcacggtggtcacgtaatgctcagtagcacgcaattcatgcgcgtccgacgagtggctaaggcccaagacgtcggtattagcgaggccattttggcggcatacgctaaagcactccaagttttaactggtcatacaaccgtgacattgccgtgcccaatcgacctgcgccgcttcacgactgaagatgcgaacgtcacccaaatcgctaatttaaccgtcaatgtttttctgacaatcaaggtagatattgatgcaccttttagtgagctcgtcaatcaagtccacgacttgttaacggtcgagcgtacgcgggtcgccttcctttatcgacttagcaatttacagaaaatgaaccatacaatgccaattacggtcatgcgtaaaatgaccaaacgctggttaccacagcctgcgctccggtataccaactttggtgtcgtcgaccaggaacggcttaaatttcatgacttgacggttgtcaattgcgtcttctcgggtgccttccagtgctcacccgttatggaaattgccgccagcacgtttgccggaacctgtacattgagcttcaatagcaccgggtccgaacgtgactaccagttatccatgaaaatcctggaaaacattcaagctcaactgctagtgtgggcacaagcagatgctcaagtagccacaactgataatgtgacgttgcgccaccaagcataattaagtcaattgataggccttaaataccggccacaaaaaatcccaagctaaatgagcttgggattttttgtggccgctgttaatctggctatcagtgtgattatggattatttagaatcatccagctaatgacgactagtcatccggccgaatcgtttccgagtaatgacttaactggtatatcggtgcccgtcgtgccaatattgctggtgctttgtgaactttcactaggcaaccagtttgcccacttggggtcagtcgaacatcataattttgaaaactagggcgtatcggcgtagtcactgtcagcggtccagtaacgcgctgtaagccaatctgaatatttgctaggtgctggaaagggatccccactaaattacttaaaaagccatcatataggcgccatagtgccccggcggacggcacccagactggttgtccagcggctgcttgtaattggaatcgtaacgtcacgtactgccgggtcacggtcaactgaatcggtcgaaccttcaaccgagtagtagcggcttttaggactgcaacttgggccaacgcttggggaacatcatagctcgccgcaaatactgggaactgattagtgggtacctgtcgtcctttttccgtagtcgtaagttgccggataactttcatcattgcttcaaggccaagtacatatgcgcgttcgtattggacccgctcaaccggtaatgctggtacaattaattgtgtcattttgccacccccatcaacacgcacttaattatcgttagtttactcacgtcttcagccccagtaaagccttttcagctatttcgttaattaattttgtcaaaagttttatctagtaatgtttctaaattggaatccttctaaaaagtgtggtttaataagggtgaatatgataaaaggaggaaccgcgtcgtggcagaagatatgttgacccaagccttgcagcaattaaaggaccataaaatccgtgtaacgccgcaacggcaaatcattcttaattatttgattactcaccataatcatccatccgtcgaaaccatctatcaggaattagcaactcaattacctaacctgagcttggcaacggtttacaatacgttaaaactttttgtcgacttaggaatcgtaattgaattacaaaatggcgatgctggcacccactatgactttttcggtcgaccacattatcacgtcgtttgtgagaattgtggtaaaattactgacgttttcgaacccgacctccgcagtgtcgaagccaaggcggcggaactctctgggtacttggttacgggtcacaatatggaagtctatggattatgcccagactgccagaaactactcaatgtaactaaaacagctgatttaaagcgattgaaattgacgcacagtgaatagaaccagttcaatggcaaccggctatttagcgcgctggttatcctaaaacaaaaggaacactttcagttttcctgtattagtccctgtcaaccttaagtggactatcacagcctgaggtgttccttttaatttatacgataagctggtcttacttacgctttaatcagcatcacaatcggaggacgctttcggaacaccaatcagcaattacacgaccggtagccctcaaccccctggccggtattaatgttgtgggacttcttccagcatgccatagaactgtgacttgtcagagaaatcagccatataggccccgttcaatccggccttttgcccgattattcctaagtcgatcattagcttttcttcttcatctggaaagtgtaaccgtcccttaatggctacactacgaatatagtttactaggcgattgactaaggcttctgggttcttagtcgtagtaatttttttatcgacctgcattaatacatcaataatatccaataagtcccccgactgatcagaccacccacttaaccggacgattagtcccttaatagcctcttgagcttgttgtcgtaattctgattctcgctgcattaataaagtccccctctatatgattcggattaccataataatttcaaattataggtatctttatatacacttttattatacacgcttatgattgcattcaaaaaaacattcataaacgttcaaaaaacgcccatcaacgtaaaaaagtccgagctttcacccgaacttaaccccactttaatttactaattaccctaacgttcctgtccaaacgcaaaatagagccacggtccaaatggttgtacaaaggctaataacaaccagccaagtcgatgtcctcggcgaaatgacttcgccgtcaagacatccgcaaccacaattgtggttgcggtaatctccatggcggcaacgggtaacaaccgttgctttaatttacgtttgatccgtggtggcatttgattgtgatgacgaaatagtcccatattgacgcctcccttaattattaccaacattataccttgttaattaagaaagcgctatctttattcatacccttgtggggctcgcccgacaaacttagtgtctgggatcgtcaattcatcaataaccgctttcccatgcagtaactggcgcgttgtcacaccgacctgtcctcgatcgattgtaatgatttggtaactactgccctcatgaacataatgatgatgtggatcatggcaatcgatcgcataggccgcagaaccggccaccacattcagaatattatctccaatcaaataacttgaaacaaagtgaacgtgaccagagaatacgccgcctaaattatgtccccgaagcaccgataacagcgccggcgtattttgtaaaatcgcatagtgcatatttgtcatcgtcggcccatctagggggtgatgcaaaaatagaaaagcccgctttgtcggtgcctgtcgtagatgttttcccaaccattgtagctgttgtggtgccaaccagcctgcctcataaccgctaacctttgaatccaaaaaataaaagtcgttgttgccaatccgcatgcgactcgcgtagtatggtcccgggtcagccggcaaatacccttcgtaaaacgccgctcgccgatcatggtttccaaggataactcgaacatgacaatcaaattcagcttccatcgtatggatgattgcgtgcagccgctgataatcgtcagcgctaccgtcatgaatcaagtccccggtaaaaacaatcaaatctggcatggttggtaatcgccgaatatcatcaataatattggcaagcttgccccagggatcgtactgctgaccatgtgccggtacttggccgcggggggttaaatgtagatcagaaatctgaataacttgtaaaggacgcaattcgatcctccctctcatactttaatcaccagatggttatctctaatatagcgagctaacgtaaagttttaccaatcttcatataaagtaactgtaaagtttgtgctaacctctctttacgcaccattgaaaagtgcccccacagcaacacctttcaccaatagttcagccatcacccgtattgccctcattatactgaaaccacattatcggcagcacgtgcccaacggctttactgtaagtcttcagtatatccgcatcttatttcgccgtcccccagagctagttgttcttgacctcagcacttggcacatgccacccgtgtttcatactgagctagctagtctgacgcgtaatctcataatttttggttgacaagcccaccttttgccgccaccatgaagataagctttaataacatcatacgagtgagggattattttgaaaaatatgtttgtcgggccccatgtggcccttgctgttccccagccagaagattttgatgagatcagtgactggtacactgacgccgattttgttcgtaaaatggatacggctgccgcccgaccactgaccggtgaagaactcgaacgaacttaccgtaaccttgatcggaataccgaatactactttcacgttcatagtttagaagacgaccacttattaggctttgtcaccctattcaatatcgaatggcataaccaggttgcccaattagccatcgcaatcggtgatcccgacgaacgcggccatggttatggtaccgagacactcagcttgattttgaactacgcttttaacgaattgaatctttacaaagtctgtttggacgtcatcgcaacaaaccccgccgctatcgctgtttaccagaatagtggttttgaatttgagggcaccaataagcgtgctatcaagcgtgatgggcaacgaatcgacctctatcacatgggcttatttgcggctgatttccagccccgcgttactttaaactaattaatcagctcaattagttgcagccaataacttttgcaattataatagtcgcagattgatagaaagtgaccaactgactgtcaatccttaatattctttagttttttcgattattagtgcgttgctgccataatgcagctaataatcactttcattcatagactcccccaagtctgatgaatggggttcatcaaagcccccactttgatgtttcctactccttgaccactacatccgctgatgtggtggcttttttattgccgtctaaaaaagccgtcatgggtatgcaatccccacaacggcctgctattatcttgtaatagccaaaacaagcggttcaacaactgcctgtttcgattagatccaactggtacccaatctactcacgagtaaattatgtgccaccaagatttaatcttcttccaactcaacattgctgttcgttcgacgagcaatgagccattccttgacttgaattaaaacccacgcgattcccgctgtaaaaagcaacaacattagtgtcgaaacaataatgacgatcacaatctgaacgccttctgcctttaacacgtctaacttagttactaacgcgatccctgatggaatgaaaatcaagctgataaattggacgaaaaagttgctaacacccgccacctgctcaagtttgaccactttaaacgttaacagcaagtatagtagaatcatcccaatcaacggtgtcggcattgggaatgcgggccaaatcttattgactaaattagcgattaaactactagctaataaaatcaaaccataaatcacaatttgtgtaataaacgcgccttttttcatcgaatccctcccggaccatctaacctaaaccaatcaactgcgcaaaccctggaaccataaaattaacaagaataccggcaatcacaaaggcgattgcaccagttgcgcccgcagcctcgctcacttcaatcgctttagtggcaccaaccgcattaccggcaattccgaatcctaacccggcaccgagcggattcttgtgcaatttgaaccagcgaataaaatggtcgcctaacgcgtaaatcaaaactgaattcagaatgactgcgaacgccgcaatggcttgatcgccacccaccgactcagccaccggtaaagcaattgctgtcgttgctgcttgtactaacatggcacctaacgctgcatccgtcagaccgagcaaccgtgaaatcccatagataccaaataatgacagccctaacccaatcgctaacgcaatcacaatgacatcccaatgtttcttaaagatatcattacgcttatatagtggcaccgcaaacgagacggtggcgggcgccacaaaccagaataaccagtcgccaccaacctggtacgcttcataaactttttgcacgggtgcctttagaatcgacgcaatcaataccaataaaccaatcccgagcagcattccaaaaaataacggttggaataacacaaagcgatttgttttgtgatataaatactcgccaatcccatacaccaagatcgacagtccgatcccgaaaaacggattattgagaagatagctcacataagttcctactttcttttagtgaaaagagtgacaaaaaaggtgccccatccgggtctagtcatcattaaatggtggttaggctcagaacagtgcaccaacacggttctcatttatcattaattaattataacacatcaaagtaatttttaatagtaggttagttcgtcaaatttaatcaactgtataaaacatcaacgcgtaagcgccaacaccggtgtgcgtcgcaataattggactagtgcgcgcaaccagtggtgttacctgtggaacaacttgttggagaagcttttctggcgcttccgcaacgctcggttcgccgacgtaagaaattccagccgcttcgactcgagtcgcatccgctaattggtctagaatttgttcctgcgctttgattagcgcctttttcccgcgaccccgcgtataaagttttaattttccggcttctaattcaaagacaaattttaatttaatcaaattcgtgaccatgccagccaacttagggacgcgcccacctttgaccaaattgtcgagcgtatccacgaacaagtaggtcttagtatgctgccgaatgacggttatcttcgccaaaattgtggccatatccgcaccggcgtgagccatccgtgctgctgtaagcacttgaaaggccatcccacggtcagccgcctgggtatcaataactgtcacatcgccactagcaagtttggcagcttggcgagcagcattgaccgtcccactcaatgtctccgtcaaatgtagtgataatacttggctaccatccgctgtcaattcatcgtagcaactgacgaaatcaccaattggcggctggctagtcgttggcaagactgggctgactgccatctgttggtcaaattccgcggtactaactgccgtatctgcaatcaagtcgccaccgaaccccacgagtaacggaaccactttaatattatactgtgcaatctcggccgtcgttaattggaccgacgaatcggtgacgattttaattgtcatatttggaaaacacctttcgattaatttgtgcttcattatagcacctcagagtctaggaccaataaaaactgcgtcacaccagcatttagccactcatattgatttatgacggtcatcatttcgttataaactttgtaaaaatcgtcatattttttcgttccatgacctaactttttcgtctgaaaatcatgcttttaaacttttcgcgtcacactttcttcacgcgtcgccgctatactatgtttatagtcattaaggaaatcccaatccttaacgaccccctaactttaatgattacttccccaagtaatgatgtgtgtgtacttaattacattttaccgatttacttcccttttcctccgtatttccccgatacggaggttttttattgccttcaagcagttgtggctcacgcgtgaacaccgtattaaccataatcattgccaatccaatttccaccataaaaaacgcgccaaggcgagaaacaaacttctcaaccttaccgcgtatcgtggtcctagtacttatttcatcttatcgagatcttctggtgcaataaaaaaactgacctgtcccgtttctaaatcaacatgcgccttcacttcaacacctttaggaaaaatccagcctttcccagtatctaactttaacggcatttccccatacgttttggttcgatacgtcttttccatcagaaaactccttcgctctttgccaattacgattaactgggctaattatataatctgacgtcgtttctcgatagtaaagacactttccaatggctttcttcagtaggaatgtcacgctaaatctgatagaatcggattaacattaaaccacttaggaggggtcgaccttgttctattcgttttttgatccgacttacctattagtcatcattggactgattatctcaatggccgcatcgggttacgttaatcggacattccggcattatgatgcctatcgtagtcaatctggcacaaccggcaccgatgcagctcgctttattttaagccaatctggtatcaatgatgttggtgtccaaaagataagcggggatctgaccgacaattacaacggtcaaactaagattctcagcctatcagaagccacagcagattcaacctctgtggccgccatcggagttgcggcccacgaatgcggacacgcagttcaagatcacgttaactattggccaatgcgcttgcggaccgccctcgtgcccatcacgaacatcggttcaagcttatcattaccactaatcattatcggcgttttattgagttacaaccaaacactgattcacattgggattttactcttctcactggcgttattgttccaacttgtcacgcttccagttgaattcaacgcctcaagacgcgccctccagattttatctgatgggcaagttttgactcgcgacgaagttcccatggtgcgtaaagtgcttgtcgcggcggctttaacctatgttgctgcagccctgtcaacattcttacaattactacgactaattattctattcggtggtaatcgtgacgataactaatcgcgccaaatggcagtgcccacagccagtcaccaaaatctgcttggtcactatcaacttagcgtcgccgcaaacttgttattactagcattgattgcgaatcaaaatagtcacttcaaaggacaacttttgaagtgactattttctttggccccaaacagtcgatcatcgcacctcgccaaggcattccgtaagaacgttgatgattcttcacacttcttaataaagcctttccctttttttcatgacattcgccatgttcagtcacaaattcttcacacaacctcggtatgattacatcatagcaattgaggttaactcaatcagctataacacaacctaaaatttttcatttactcctccaaagtaatgaaattcatagtaacatgtgattccccgtcacatgtttaccctactcctttttccaccgtattccccgatacggtggtttttttgttttctcgtccgctctattcgcacctaccgactactttaatacgtcatagtaatcatatttgttgtactttttacattattaaaccaaaatataactaatgattaaccatgctttttagttattcatctgttaagggggagatttactgatgaagcaagtatcgattattggcgctggtattggtggcttaaccgctgcagtacggcttcaaaaattaggttataatgttacgatttatgagcaaaacgcgcaaccgggtggcaaaatgaaccagattgttagccaaggatttacatttgacgtggggccgacgatcgtcatgatgaaagacatctacgaagaagtctttcgcttttgcggggtcgatccgcacaactatttaccattcgaagaagttcaacctttgatgcaccttgtctttggtgatcaatctagtctagatttgtcacgcgatctcccaacattaattgccgagattaaccgcattgcgcctgatgacgtcaatggtatgttaaattttttagcggatatttatcaccggtataccatcgcgaagcctaattttttagaacgatcattccgtaactggcgtgacttttataacctacccgctctgtatgcaggactacagctacgcacctttaacaatgcctacaaaaacattgcaaaatttatcaagaatgagaatctacttaattcattagcctttcagacactgtatattgggatttctccctaccagggcccgtcgctatacaacattattccaatgattgagctcttctatggggtctattttttaaagggtggtatgtacacagttgtcaatagtctcgttaagttattcaaagaacaaggtggtacgttaaagcttgccacaccagttcaagaaattatcatcaaagataaagttgctgttggcattcgtgtcaataatcatccgatccacagtgactatgtcctatgtaatgctgattttccaaccgccatgacaacactgattccaaatgagcaagatcgtggtcagtacacagatcaaaaaattgccaaaatggattattcatgctcatgtctcgtcttgtatttaggactagacaaaaaatacccaaccgaagcattacacacgatccactttgcacaagatttcagcaaaaacgtcgccgatctatttgacaacggcaagttaccagaagatccctcgtattatgtctatgttccatcaaagatggatccaagtttagctcccgaaaacagtgaggcactctatgttttagtaccagttcctgagctctcaaagtttaatgactggtcaccaacaacactgaagaactatcgtcaactaatcattaacaaactaagacaaacggctaccttcagcgatattgaacagcatatcgttgtcgaaaagcagtttacaccggttgacttcaaagaacagtttggcgcctataacggagccactttcggcttacgaccgacgttaaaacaaagtaattattatcgtccccataacaagttcgactatgccgaccatctttatttttgtggtagtagcacccaccctggggccggtgttcccattgttatgcaaagtgctaaattagccgttgaggagttgattaaagatgaccaaactaatgcctaaattcgaacaacatcgcactgactttacatactgtcaaacaattactaaaaggtcttctagcgcattctacaccgccttctcgcaattaccactagaacgcgcttggagtatttacgccgtttatgctttttgtcgaacagccgacgacctcgttgatgttgaccatgatattgatggtctaatggcattgcgccaatcattgaccacctttgccaatggtcatgtcccagaccacccaatgtggcgcgcactggccgtcgtttttgagacttatgatatgaatcttgacgtctttttcgatatgctcactggtcaagaacaagacgcgacttttaaacaacctcaaactcagcaagcacttgaagactattgctattacgtcgccggatcggttggtctgatgattttgccaatgctagcaactaacccgcaatcacttgtcaaaccagccgtagaattaggcatcgccatgcaactcaccaatattttaagagatgttggtgaagactaccaacgtggccgaatctacctgccatcaaaactattggcacactatcagctcaatccaactgacttgcatggccccatcccatctgccaattttattcggctttgggaacatgaagcacagattgccatgaacaagtacgaggctgcattaaccatgatgccacaaattgatcccgtcgcccggccatcgctattagccgccactttgctttatcgtgaattattgctaatcgcacgtgaacaacactacccaattttaagtcagcgcgtctttttgacagctgaacgtaaaacacaggtccttaatcaagttagcgccaaaatgcatgaactagcccttaaggaggcttaatgccacttgaatcggtatcatacttggcacgacgaaatctgtccataccggaatattgaccacccacaaataatttttagttttttcaccagtcaagtaagcgatttagttaccttttaacaatcaaactactatactaaacatatagtgactggacatctccttcagccacttgaacctttttcatttactcctccaaagttaatgaaaaacaggctcgctggggatgccacctagcgaccaatgcaatttataggtcatcgcccgccgcgatggccttttatattactagaataatatagttacatctcacttctaatcgacgtatcatattattgagagattagaggagtgatatttaatgaaaaaaacacgcgccgtagccggaattagtgctcctgtggcaattttttcggccgccctattcgcgagtgagaagctctacgattttgctttcaagcgtgttgattacgtgcccgaaacttcggcagataaacaaaaatacgccgatgcctactacgcttatgtcgattggctacaccgacagcccgttcaacagtggcaactgaacgctaatgacgaggccaatcaccttgtcgcacagtacgttcctgctaaaacaaccagcaaccgaaccgttattgtttcccatggctacaaaggtgatggtgaaacgatggcaaattacgcttatatgttccatcaaatgggctacaacgtcctcttgcccgacgatcgcggccatgggcaaagtgccggcaagtacattagctttgggtggcaggatcgccgcgactatttaggctggatcgataaagtcgtccgtatcaatggtcgtcacacggatatcatcctttttggtgtcagcatgggtggtgcgaccgttgaaatgatgagcggcgaagaccttccatcacaagttaaggccatcattgccgattgtggttattcgagtatcgaggaagaactcgcttacttattaaagcgacagtttcacttaccaaagtatccgtttgtgcccatcgttagttttattaaccgccaccgtatgggctattatttaagcgacgtcagttctgtcgaacagctcaaacataaccatctaccgatcttctttattcacggtgacaaggatgtctacgtcccaagttggatgctcaaagaaaattatcaggccgctaagggccccaagcagatgtggcaggttcccaacgccactcacgccgagagtttttggatcgatcctgccgagtatcaacgacatgttacagcctttttgaatcactatgttcctgataaataaaattcagtcgaaaaaccgtatgcgctattcactgcacatacggtttttttgaccgcttaagttgttttatgactggctaatgattcgggctaagcggtccgccatccgttccagattggctggtccctgcgccatggcttgatctaaggtcatgacttgatcgacaatcggtaaaacagccgtgaccccctgtttggcaaatgtttcatttgcacctttttgccgaccaactaataaatagcaaggcttgccggccgcttgggctaactgactgagctgaattggtaccttgcccataaaactctgatcgtcgacttggccttcaccagagataactagatccgcttgggccactttcgttttaagattgctcatttcagctaacaattgaaaaccagagcgaacgcgggcgtgtaaaaagtaacgtaatgcaaacccaataccaccggcagccccatcgccttcgtgggcactcaccgcaccagctgcgaccgtcatatagtgagctaaagcggcatcgtgaacctgaatttgagcaaccggtaatcctttttgtgggccaaaaatcttagctgcgccgttcggtcccgttagcggattcgtcacatccgctgcactaatgaacgagacttcagctaattgtggcaacacatgtcgatcgtcaatcttagtgacccgacttaaatcagcgccagtcatggctaactcttgaccatcggcagcccaaaaacgataaccgagcgcacgtaggattccggcaccaccgtcgaccgttccgctaccgcctaagcccagaataatctgccgggcgccacgctcaatcgcatctttaatcagtagcccggtcccataggtattcgttgctaacggcgtcaaggtcgtcgtgacaaactggattccggatgcagccgcaacctcaatcactgccattttttcagtggcaaagtagccatacgttgcagtcactggccgttgcgccagatccaccgttgatgccgtaatagcttgtccaccagcatggttagccagccacgccgccaccgttccttcaccaccatcggcaatcgcaacttgagtagcggtgattccgtgagccgaaaatcgtttagccactattcggttggcctgaatgctcgtgatggaatttttaaatgaatcaattgcgatcaaagcgtgcatattaacgtctccctattgacataattactttcagtataatcattacagcgggcgcgagcaattcatatcagttgtcaggtttcttaaaactcgttaagcttaagttaccaaaattttaatggaggctgataaatcatgacaaacaaatacgattacgatgtgttatacattggtgcgggtcacgccacgtttgatggcgccgcaccactcgccaagactggtgttcgcgtcggtgtgattgagagtggtctgattgggggcacctgccctaatcgtggttgtaacgccaaaatcactcttgatgaacctgtcaaattaacgcgggaagcagcacgcctcaatgatattttgagcagtgcaccaaccattaattggacggccaacgtggcccataaacaagagattattgatcccttaccagcaggcctgacagctcgtttggaagatggtggcgcaacgatcattcatggtcatgccacgttcaaggacgctcacaccgttgtcgttgatgatcagcaaaccattaccgctgaaaaaatcgttattgcgactggtttaaagccccatcgtttagatattccggggaccaagctcgcccacgatagtagtgattttatgaaccttaaacggttaccacaaagtatcgtcatcattggcgcaggctatattggtatggaatttgccaccatcgctaacgcggccggtgcccaagtgacagtcatgttacatggcgaccaggccctccgtgatttttaccaaccattcgttgcacaagtggttgacgacttaactgaacgtggggtaaccttcatcaaaaatgccaacgtgcaagcatttaccaaacaggatgaccagttccaagttagttatggcgaccaccagcaattaacgaccgactggatcctagatgcgactggtcgaattccaaacttagatggcttaggcttagaccggattggcgtcaaatatgaccgccacggcatttatgtcaacgaccacttgcaaaccaacgttcctaacatctatgcagccggtgatgtccttgccaatgacttgccaaaggtcacacctgcagcctactttgagtccaaatacttgatgcgtttgttctctggtcaaaccagtgctcccattgactatccggtaattccatcggtcgtctttacttcaccacgaattgcgcaagccggcatgaaaataccggctgctgaaaaggccggcttaaccgttagtgataacgatttagcagattactggtattatcaagtctccaaggaaccgattgccgctagtaaacaggtccatgaccaagacggccatctcgttggcgtgactgaaatcagtgatcaagctgaagatgccgtcaacgcactactaccagctatcgaatatcaattagaccgcgaacaaatcgaccgtttgattggtattttcccaaccatcggctacgcagcttggcaccgggcttaaaacagaaaacactgctgcgaccgccgcttgattaatcccttattaataaccagagccgccaatgacccccactcattggcggctctggttatgttcgttccattactttagaaaccaactcgggcctgcacatcaagcatactgaccatgctataattgcgcctatctcaacgattgaaaggttggtcctaacaatggatgtggatgctcaaaaattatttaccttagtagatgctgcttataatcagccgattaccaatcaaccatccgattcctaccgccaagcgctactggcagctgcaatcgacctgaataacaacgtttcgccacagcaagtaaccatccagctatatcaagcctattatcgtaactatatggtcccaacgactctaccacgccagcatcgtgacctctaccaatacgttcacacccaattacagcgcctcacgcgcaaagaacagcgtcatatggcacttgggtatggtctgattgcgacgcacctaacatttggtcccttgaactgaaatcaaggtacttacacgcattgcgctagttatcgtttagtatgaagcatgattaaaccgtgccattatcaagctcaaaaatagccattaatcgtccccagccccggaggtcgaaataggacgcgcatcggctgacgaataaacagcccatctttttagcacgttttaatcataataaaagccccagcgattactcatcgctggggcttcatcgtttttaaattaatcgtctaatcccaatcgtttgaaaatatcatcaacgtggcgaagatggtaatgatagtcaaacgcatcatcaatcgcagcctggtccaaatgttcacgaatctcggcgttaccttcaataagtggcttgaattgtaactgttcatcccatgacttagccgtcagtggttgaacgaggtcataagcactttcacgagacatccccgtatcaatcaacttgagcaagacacgttgactgtagatcaacccgtaagtcgcatccatgttttgcttcatccgttctgggaacaccgtcagcgtcttaataatcttattgattcgagttaagatataatccactaaaatcgtggtatctggtaagatgatccgctccgcagaagagtgggaaatatcccgttcatgccacaacggcacatcttcataggcggtcatcatgtggccgcgaataacccgtgccaaccccgtcacgttctcagaaccgatgggattacgcttgtggggcattgctgatgagcctttctgacctttattaaagaattcttcaacttcatgagtttcagatttttgcaaaccacgaatttcggttgcaaacacttcaacgcttgttgcaatcaaggccaaactagcaatgtattcggcatgtaagtcccgtggtaaaacttgcgtcgaaatttcttgtgcgcgcaatccaagttgtttgcagacaaattcttcaacaaatggtggaatgttcgcaaaagtcccaacggctccactgattttacccgcttcaacgcccgcggccgcgtgttcaaaacgctcgatatcccgattaatttcagaataccaccgggcaatcttcaatccaaacgtggttggttcagcgtggacgccgtgtgtccgccccatttcaaccgtatatttatattttttcgcttgttgtgctagtgtcgcccgtaaatcttgtaagtcttggcgaataatcgcgttagcctgcttcaaccggtaaccttgcgccgtgtcgacaacgtcagtactggtcagcccatagtgaacccacttacgttctgcacccaacgactcggaaacatcgcgcgtaaaagcaaccacatcatgatgcgttacggcttcaatctccgcgatccggtcaacatcaaacttggcattctctcgaattttagcaacatcacttgctggaatcttccctaattcagcccaggcctcgtcggcagcaatctctacctccaaccatgcttggtactgattttctaacgaccatactttgcccatcgcgggacgcgtataacgatcaatcattgctaatcctcatttctttttaggtattcactaacaaaacacgaacattattatagcatacccctcgagtaattaatagagacgaacaatgaaaaaatactgttatttttcacttcgtttccatattaaggacttgttttcgaactaattcgccttaattatgaacgattatttgtgctcaaaacaagaacattcggtttttgggttgcgttttgacgttaaagttgctatactctttcctgttggagtggtgaacgtttaactactctttaggattaattattcataattaaactatttaatgaggtggaagaatatggcatcagtcgtagtagtaggtagccagtggggcgatgaaggtaaaggaaagatcacggactttttgagtcaggaagcagatgtggtatcacgttaccaaggcggcgataacgccggccacaccatcgtatttaatgggcaaactttcaaattacggctgattccatcagggattttcttccatgataagttagctgtcattgggaacggcgtggtcttaaatcccaagtcattagttgaagaattacaatacttgcgggacaagggcgttaatcctgacaaccttagaatctctaaccgtgcacacgtcatcttgccttaccacatcacattagatggcgctcaagaaaaagctaaagccggtggcaagattgggacgactaataagggaatcggcccagcctacatggataaggctgaacgaattgggattcgcgtagccgacctgcttgataaggacacctttgcggcgttactcaagcgcaacttagctgaaaagaaccaaattattaccaagctttatgacttagaaccactgaaatttgaagatatttttgatgactattacgcttatggtcaaactttgaaaccattcgtcaccgatacttccgttgtcattaatgatgcgttagataacggtcaacgcgtcctatttgaaggtgctcagggagtcatgctggatattgatcaagggacttacccttacgttacttcatctaacccagttgccggtggtgttactattgggagcggtgttggcccatctaagatcgataactgtgttggggtcttaaaagcctacacttcccgcgtcggtgacggcccattcccaactgaactctttgacgaagtcggtgatttcattcgtgaaacggcccatgaatatgggaccgttactaaacgtcctcggcggattggttggttcgatagcgttgtattacggcatgctaaacgagtttctgggtttactcatcttagtttaaactgcttagacgtcttgacgggcttaaagaccatcaaggtatgtaccgcttacgacttaaacggcgaaaccatctatcactaccctgctagtctgaaggaattagaagcttgcaaacctatctatgaagaagttcctggctgggacgaagacattactggcgttaaaacctttgaggaactgccaactaatgcacagaactacttgcgtaaattagaagaactcgtcggcgttaaaattgccaccttctctgttggtcccgatcgcgaacaaactaacgttatcgatcacaacatttggggctaattgaacgcgacaccgtgaattaacttaaaggagttttgcatcatgggcatggagatttttgattacgaagatattcaactaattccgaacaagtgtgtcattaatagtcgttcggaagccgatacgaccgtagaattgggtggccgtcgttttaagattccagtggtgcctgccaatatggcaaccgtcatcaacgacgagattgccaagtggctcgccactaacgactacttctacattatgcatcgcttcgcccccgagacccgccgtgcttttattgaaacgatgcatgccgcgcaactgtacgcatctatttcggtcggtgttaagtccagcgagtatgactttatcgacgacctggctgctaatcaaatcgtgccagaatatatcacgattgatatcgcacatggtcatgctgacagtgtcattgcaatgatcaaacacatcaaagacgtccttccggatagttttgtaattgccggaaatgtggccacaccagccgccgttcgcgaccttgaaaatgctggtgccgatgcaactaaggttggcgttggcccgggtaaggcctgcattactaaagtcaaaacgggctttggtactggcggctggcaattagctgctgtccggtggtgtgccaaggccgctcgcaaaccaatcatcgcagacggtggtgtccggaccaatggtgacatcgccaagtcgattcggttcggcgctacgatggtcatgattggctcaatgttggccggacaccaagaatcacccggcaacattttaaaaatcgatggtaagacttataagcaatactacggttccgccagtgaaactcaaaaaggcgaacataaaaacgttgagggtaaacaaatgctggttccttaccggggccgcttagtcgacaccttaaacgagatgcaagaagacttacaatcatccatctcatatgccggtggccgggatttaaaggccattactaagtgcgactatgtggtagttaaaaattcgatttacaacggggactaattaaagaaggacacaagccaaactggtttgtgtccttcttttacgttcacttgctagattttagttcgaagtacctgtgaccagcttcggccttacgtcatagacagttgttgacggtaggtgaccagctccgattgattggcatagataaaatgtcccggaactagttcaacgaattgagctggatcagtcgtataatcgtgaactgactcgtgataagtcacgagttgcttttgccgtgccaactgtggatcaggtattggaatggcggctaataacgattgcgtatacagatgtagtggatgggtaaacaactccgcggtcggtgcaagttccagaatacggccgttgtgaatgacggccacacggtctgcaataaagcgtacgacggataaatcatgggcaatgaacaagtatgataattggctctcctgttgaaactgccggagcagattcagaatctgtgctcgaatcgagacatccagcgctgagatcggttcgtcggccacgactaactcgggccgcataataagggcgcaagcaatcccaattcgttgccgttgaccaccagagaattcatgggggtaccgataaagatgttctggtagcaaccccaccgctttaatcatctgctcaacttgatcacggcaatcctgttcagaatgaaagaggtgaaaattcagcaacccttccgaaataatatattcaatcgtcgcccgttcattgagtgacgcggctgggtcttgaaagatcatttgaatcttgcgcatcacttcccgttgcgcatcgattgctaagtgctgattaatgagttgttcatggaacgcaattgtccctttcttagtcggaataacacctagaattgcgcggccaatcgtcgtttttcctgatcctgattcaccgaccagtgccaaggtctccccccgataaatgtcaaaattagcgtccttgaccgccacgaattcccgctttccttggccaaaggcaatctccagatgcttggcggctaagagtggcgttctttcattagtcatgggtcgtccctccccgtatctgaccaatttgcatttctgacttggtcaaggcaactaggcgcgcgtgtagattctgaatcagggccggtttctcaactttaggtgcccggggatcaagtaaccaagtcttcgcccaatgggtcgggctcaccctgaatttgggtggttcctgcttaaagtcagccgctaacgcataccgattgcgcggcgcaaaggcctcccctttgatatcgtgaaatagtgacgggggcgtcccgggaatcgaatacaagccggaatcagcggtcgccagttgcggtaacgccgataacaagctccaagtgtagggatgccgcgggtcataaaaaatctcatcacaggttcccagctctacgatttggccggcatacattaccgcgatacgatcagcaattgcagctacgacaccgaggtcatgcgtgataaaaatgattgaaaaatggtattcacattgtaattgtttgatcaaatccaaaatctgagcttgaatcgttacgtctagcgcagtcgtcggttcgtcacaaatcaggatttgcgggtggcaggctaaagcgaccgcaataacgattcgttgccgcattccaccagagtactcaaatggatattcgttataccgttctgcagcatcgggaattcccgcccgggtcattaactcgattgcctgcgctttagcttccgcagccgacttcttttgatgtttgataatcacttccgcaatttgggaaccaattgttttgataggatccagtgaggtcatcggatcttgaaaaatggtcgtaatcccttttccgcgaatctgattccactctcgatccgtcttcaagtcactcaaacaggtatcaccgtactgaatacgcccaccggtgatgtgcccattatcttccaacattcccgtaaaggtcttcgttaacacggatttaccagaccctgattcaccaaccaatgcgaggatttcctgatcatataatgccatggaaacatggcgaatcgcttttaattgctgcccgcgaacttgaaagcccaccgaaagatcatcaacagctaatacaactggtcttttcatcacaccatcctcctactttcttgacttatcaccacatggctaacgatgtgtccgcgggtcagatgcatccgccaaattttgcccaacaatgtacaacgacacggtaatcagcgccagtacggttaccggtaaccagaacaagtacgggtagctggtcatatctggtgaatattgggcgattagccgcccgagtgacggtacgttggcactcagtcccactcctaaaaatgacagaaagacttcaaatgaaatgaacgaaggtaatagttgggacaattgggtcacaatcactgacgtcagatacggcaaaacattacgaatgatcaaccgtcccatcggcgtccccagtgtctttgaggcgatattatactcacgatcgcgtcgaaggatgactttcaccctaatgaaatacgccgtatcaagccaagtcgtcactgtcatcgcaaaaatcagattccaaaatccgttgccaaacgtatacgataaaacaataataatcagtaaattaggcacattggacaagacgttataaatctccagcatcacccggtctaacttcttggagttgccccaaaaggctcccatagcaacgccaatcaccgtcgtaatcaacgacgcaatcacgccaatcgaaatcgatgtgcgggctcccgcccagactgcatcaaataaagacttcccatcagcatccgttccgaaccagtagtgccagctcggccaattatagcgtgcgccaaaatcattgatgttactaacgttcatcagactatagccactgaacaagggctggatgaacgccaataataaaattatcaacatcagtacgaacatcgcaatcgtcagtttattggcaaaaaagactttcgcaacggagcgccagtaagaatatcgcggcgtttcgatcttttcggtggcctgatcattcaacgtcacaaattcaaaatccgcgttactaacttgattctggtcgactttttcaggttgcggtttatctcgacctattaccatcctaatcatctcccgttgctgtcaatttaattcgtggatctacaatcgtcatcaagatatcgcccagcaagattgaaaagaccgcaatcgtcgtaaagataaagactagcccaatcacaatcgggttgttatgtgttaaaatcgcatccggcaacatcttacccatgccaggcattgcaaaaatcgtttcagtcattgtcgcaccgccaatcaaaccgataattgaccctggcaatccttgtacgatcggtaatgaagcattcttgaagatgtgtttccgataaatctcgttatcagtcaaccctttgaccttggcaaacttaacgtagtctgttgactgttggtcaaccatgtaacggcgaaaccaaatgactaagcctgaaaccgatagcaaccccaggatcaaagtcggtgacacccacgatgccagtacgctcgcaccactcattggaaaggtatctggcaagttaaagacggcactgccgaagtaccggaacgcataaataaaggctaagctcggaaccgcaattagggcggtcacaatccccgtaccgagtttgtcgaaccacttacccttataacgggccatcaaaattgccattggaatcgcaatcacataggcaatgatcagtgcaccaagtccagctttaaaggaagttccaatcatcgacggatcatgattctcttggaccaccgcagtgtaattgtcaccgtattgcgctcgggcagttgcatcttgccgactagtcggctggtactgacgcgtatagacatcatcagtgctcaacattttttgaccatttgcaaacgtatactggtgcgtcaccgcctccccctgatgactaccaatcacctcagtgacccgtgtgccagcataggttggataggaaatccctaagttcaaatggacgatgttttcatgtaggtatggaaacatcgaattgacatataattgatacttgtagcgcgtgccagacccaatcaagctccagccgacaatcggatcgtggctgatttttaaataccgtggtaacttaggattagccggatcgtgaatggcccatggcgtatcgacctggattagtcccgaatagaacttcaccaaccgttgccacaagggtaactcacgggtcgcataataattcccactttgcggatagcgatgaagcgcatagtgataccgcgttgcccactgccgcaaccggttaatattgaccgcagtgtgcgcagccgtcaccgtttgcccccgatttgacgcttgcgctaggagtgacttagtatccagatagtcgatataattcatcttgccataggcggtattctcgtaatcgaccaactgatcaggactagtactcagcttactgatcattggatcggatttaaaaatatcacgccgcggaactaacgaataaatgatgatataagtgagcgttgtgaccaagaagatgctcagcaatgatcgcaacacccggtaaaacaagtatttcttcacgacccaccacttccttcataactcaacacattagtaacaacagatacagaaaaaggctagtcttgctagccctcttttccttcacgcaagggccgacctaatttgtcggcatatcttccgcaatttgtttccgctttgcgagccattccgcccgcgccttcttggcttcagacgtcgtgacagcattttcccgaactttcaaaaacttatagcgaccagcaccaagccctgatggtgcatacggaccactgagcggctcgattcggctgacaatcgccccagcgccacccgaattagttggaatcacgatcccactattcaacaaccaagcttcagctttagcgaacgccttatagcgagcagcggtatcagtattaatggcttcagctttggccaataacttactgtattgatcaaaatcaactgctttgattgcggccgcattggaagccgatccaccggctgttgcggttggatctaatcctagggtgtgcaagttcgccccagaaaccgggttatagatttcgaggtaagtcgacggatcgtcatagtctggcgtccaaccagatccattactaatatcaaaatcactagttttacccgtcgttgcgttgaaagtcgcggcattatacttatcatcgctcaacagttgtaaatcaatgatgacgttttgtttacccagcgtggattctactgactttttaaacgacttagcttgattcaggagtaatgatgatttttcatctactggcaaatcgagatggatcgggccactaaccccttgatctttcaattcagcctttgctttgacgaaatactgtttagctttcgtcggttgataagttccatcctgaccatctgccaacttaatatcactgaagccagtattctgcatgtcttcctgaagttgcgtgccataatccttaccaccaatcgaaacaaatgatggtggggttaattcattacgcaaccctttattagcgccaatcttcccgttaacctgcgcgttgtaatcggctttattaaatgcaaattgaacggccaaccggaaattctggttcaaaattgccttacgcgtatccgccttttgttgatcagtcttcttggcggtatcgttgtaagactggcgattcaagttaaaagtaaagttatagactgacgaatcttgactggtccacagaacattattcttgttctgctttaaaaccgtcttatatccagctgagcccggataaacccgagcataggtgtaattgcccttctcaaacgatttataaaggccatctggattactgccatcatcaaaagtaagcgtaaccgcctttaaataaacgtgcgacttatcccaatacccgggattagctttatactttaagacggacttcgaggtaaagttggcaagcacgtatggcccgttgtacaggatgccatccgcagtcaccttaccaaaatcagcccccttttgctttaagaactgcgcgttaattggatacatcacgccgtacgttagcttggaattccaatacgtctcaggcttattcaaccgatactgcacggtcgtcgcattgagtgctttaacacccacggttgagaagtccttagtcttacccgtcgcataagcattgagccctttaatgctattttgaacgacgtataattgctccgactttgccgcaaccgcatgttttagtccggtcacaaagtcttgggccttaacggtgccatgcgtattgccttcactatcgacccattttacccccgaacgtaagtgataggtgtacgtcttgccatctttactaaccgaccacgatttagctaagtcgccagttaattgtccatacggattccgttcaagcaacccgtcttcaaagttagataccacgtcggtattattctgctttgccgaaacggtgtaatcgaaattatcaggatcctgcacatacacgtagttgaaatggtcagtcttaacctgcttctgattacttgccttggagctcccacaccccgctagtaatagtgttccagcaaagaaggttgctgccaaccagcctttttttgctcccattgtgtccccaccttttgtatagtcgttagttgatactaaataaaaatacgtgccgcaatcataagcggttagagctttgatttcaagatgttttctcattattttcatgttaaaacctcatcaagcgtcttataaatcccaccacactaaagtttcgtcgtgacggccggtcactttgacaatgattctgttgtgaagtttccaaaccaacgtacctacttaaaaaatggcggctgtgactttaacgactgcttgttaatcacacctgacaccagcaatgaaagcggttataataaagctaaatcactaatcgaggtaatcagactatggaacacaatcgggtcttacgactagaacacggcatcaacttccgagaactggggggttatgagaacaccgctggtcagacaatcaagtggcaaaaactgctgcgttgcggtggcatgtcactactcactaaccgcgatctcacctacttggataactacggactccgttatgatatcgatctgcgccaagccaatgaagctgagatgtctccagaccgttatcccaagaatactaagtatattaatacgtctgtctatccgttcactgacaatcgtcgctttgatcgccgtttaaaacggctcatcaagcgaatggtcgtcgatgattccttcaacgcacaaacatatgcgcaaatggttacggatagtcatgccgtgaaagtctggcaaaatttatttgcgaccctcctcaccaacgaccagcccgaccaatcggtactctttcactgtgctgctggtaaagaccgaacgggggtcgcgggtgcgctcattatgacggccctagacgtccctcgtgaaacgattatgcaggactacctgctcactaacgccgtcttcatggccgcagacagtatggataccgctacgatcattaccaaggccaatgctggtgacctagctagccaattcaacgttgccatggctgttgaagccgacaatatgaagatggtctttcgggttttcgacgacctctacggcaatggtattggttatttacgagaagtgcttggtctatccgtcgcagatataaataatctgcgccaattgtacttggacgattaagcacactaaaaagctgattttaaagagtggttgactctttaaaatcagctttttagcaacgcccgttcatttgtttgattataaaattggtgataaaagccgtgagaacgtctgcttgaacttcaaccagaatgactgattcttaaaatcttgaacggtaatcagactactgattttttgatcttctaagaaaatccgttccaactcttgtgctaaatcagcatcgtataaaaaggcattcacttcaaagttgagcttaaagctccggaagtccatattagctgagcccactgacgccacctgaccgtcaatgacaatggtcttagcatgaataaagccattattataataataaattttaacaccagcatctgccagttcccgggcatagtactgggttgcccggtaaacaaaggcatgatcaggtttgtccggcaccataatgcggacgtcaacccctgacatcgcagcgattttaatcgcatctaatacggaatcgtccggaattaggtatggcgactgaatccataaacggtgttgagctgtcataatcattttaatataacccaatttaatctgttgtgcatcactgtccggaccactggagacgatctgtaatgaagtattccctttaacgcgaatgactgggaacatattaacgtctggcacgattcgatgttccgcatcggtggcgttccaatcacgaatgaaacgttcctgcaattcaaaaactcctgaaccgacgatccgcaaatgggtatcacgccagtaaccaaacttcttactacgaccaaggtactggtcaccaacgttaaaaccaccgacgtagccgacccggccatccgttaccacgatcttacggtgatcacggaagttgagacggaagtccaaaatcgctgaatgagcacccaagaacggtcgggcatgcccaccaagttcttctaaatgcttaaagaagctgcggaacgtgcccatcgacccccacggatcatacaagacacgaacgtcgacgccttgggctgctttccgctctaaaaggtgtaataattcatttccaatctggtcattataaaatgtgtaatattcaatatgaatatgattcttagctgcttcaatatcttggaacatcgcatggaacttctcatgtccatccgtataaatcttgacccggtttttacggcttagtaacgcgccatcggaattcaagaataaactgaccatcccacgaaccgagctagtgaccgcatctgcgggcatcaattccgttcccagggcttcacgttgccgctgaatcatctgttcgagtctaatttgcgtctctttacgtaaccggaataaccggttttttggtaacttacgaccgacaaaggcgtacgcgataaacccaataatcggcaaccaaatcaacacgagtagccaagcccaagtggccgcgatgtcccgattacgatcccggaacacggtaacgaacgccgcggccgcgtttaaaacgataattgtatagaaaattggctgaatatattgcaatggaggcacccacctaatttattaatgatggttttattttaccgcagatagtagtgagataataatcttttgcgaatataatttttgcatttaatcattaaatagctaataattatgcttaaggagggcgcgttcaatgcttgcaatgcttggaattcacggcctcggccccattcgcatgtttcacttaaccgaacacattgcgggtccgcgagcggccgttggtattttactaattattattttattagcggtcgtctaccgttactatcgacgacatcgttaataaatcaaatctttgaagcagctggtgaagtctcccagctgtttttttgtgggtcattatcttacggatcggtttattcaatcattgcagtatacctctgctaccaccggagaaactcataacaaatatttttgaccaagttaaatcctcaaataaaaaagttgcgttgattagacaatcaacacaactcgattcgaccaccccttctgaacatctgttgtatggcctgattgagttaacgcattacctaccccatttttcaatgtaggccgatagtaaactaaatcattggaaccacctggttaatggctttttatgaaatcgttagttcacacaaagacttgtcgcttaaagcttggacgtaattcgaacgtcccgttgcgctgagtttttgattggtatcgagatagatttcacccgtccaatgctttatttttttagtcggcggtctaacgattacgcgatagacgatggggcaatttttcagggtcatattttttgatgactgatgcaaaaactttttgtatttcttactttccgctaatgtttggctggttgcaaatgtgtattcataccaaataatgccgctaaaagggccggattcttccttgattattgtgtttctcgagacacgcacgtcataaggactgctttttaacattgttgttagtacagtcctcgcttgatttaactcaatacgatttttaacgtacccgtataaacagaagctactaataaggataattgcaaaaagcacgtaatgtgtaacggtctttgctttaagaaatgacgacatgactaatgcctcccaactttattatctggaaatagtctggcaatgctttatacattatgaatgcagacgtactagtatcaatacttttattaccaacaccaaaccaatcagcttgctatccccttttttgattcaagatctgccagtcattgcaatcactagcttcgataccagcaacaatcagcagacccagtagtccactaatttcaagtggcctttaatattggtcaggccttgatttgcgttctccttttgaatatagcaaacgccaaacccattgtcaccaactaatgaatatcattcgtatttgttaattttagaattgcaatcaagtttgtatttggaataataaaatttatgcaaatgtggtcaataaatgttgatattggaaggtcgagacgaatcacatcagtttcccgtaggccgttttacctgcaagaaaattaattatccaatttgattcatcaaaatactttaaggataatcataatcccattttattcatataatcgatatcaataaaaaagggttccaataagccgctcactctctccagttcttcaggttgcatcaatcaagtggcgatttagtgagccaaaaccatatttcctaaggtccttcaataatccccactcacaatcgcaatcacaaggtaagttaaccttcagaaaaacaatccccgccatgttcgctatatcaccctattaataggcgttgaataccatagctaattaatcacgattagtcagacaatcagcaagaagtcgcaggatgtcgcgcgattgcgtccaattatttggcttttagtcactatagcccatcagaatatttattttggtcagattgaccatcgtaactttgtcaaaaccgattaaactaaagctatcacatcgaaatggggcgatgattatggatttatcacacacgcggttactccgcaaaaaagatatcaatgccatgttagccacttatcacagtccgctcaaaaaggaacttaaaacatttgacctaacgatgctgggaattggggccatcatcgggaccgggattttcgttttaactggtacgggggccttgacggctggtcccggcctaatgatctcattcgtcttagctgcaattgcttgcctgtttgcttcactctgctacgctgaattcgctgcgatggtgcctgaaagtgggtcagcgtacacctatgcctacacaaccctcggcgaaattgttgcattcattatcggctgggacttgatgttagaataccttttcgctgtctcaaccgtttcagcgggctggtcaggctactttcaatcattcttggcgggcttcggcctcaaactgcccgctgctttgtcggcagctgcaggttccgtccctggtgtgaccagctattttaatctgccggccttcaccattattatcctgattaccactttattgtctctcggggtcaaagaaactaaacgcgtcaataacgtcatggtagtgattaaattagccgttgtttttttattcatctttaccgcggtgcgcttcatcaaaccggcaaactggagtccgttattaccatttggcttcaaaggggtcttcggcgcagcctctagcgttttcttcgccttcatcggttttgacgccatttcatccagcgttgaagaaacattggaaccatccaaaacactcccacgttccatgttactgtctcttggtatctgtaccattctctacgtggctgtatcagccatcatgactggcgtggtcccatttgaaacgtttgccaagtacattgatcatccgatctcggccgttcttatttactccggtcaaaattggatggccggaatcattgaccttggcgcgattcttggtatgaccactgtaatgttagtctgtctctacggtcaaactcggatttccttctccatgtcgcgggatggattactcccccatgtctttagcgatattagcgccaagaccggtgcaccacttaaatcaaccgtcttgtttgggtcgattgccgcaatcatgggtggctttattccattagctgacttagctgaactggtgaatatcggtactttgactgcctttaccctagtttccttctccatcttacggttacgtaaaacacaaccagatcttcggcgtcccttcaaaacgccatgggtcccgtttgtaccaatcatgtcaatcatctgttgtgtcttcctactaatcaacctgaagcctgtcacttggattcgcttcgtggtatggttagccatcggtatggtcgtttactttggctattccgttaaacactcccagttgaagacgaatacagccactgatgagaaataattgactagactaataaattcaaaactaatgggtcgcttcatttcagcgttatcaactggaatgaaacggcccattttttatcctctaaatacgaacaaccggattacttattgtactcaacttgaagtaaagttcacctaacgaaacgtaagttgaaacttgttaacatgagcaaatttttagtttgtctggttaaccccttttgaaaaaagctagtatagtatgagtcacagttctaattgaagtgggggtcaataattcatgcgtaagcaacggattcaggaacgttcattgattggcatgttaatcacattaggcgtcgtgtacggggacatcggaacgtcaccgctatacgttatgaacgccctgatcaatgacgcggggcaacttaagaatgcaacacctgattatgttatcggcagtgtttcattaatcttttggacgttgatgctcattacaacggtaaagtacgtcctgattgctttacgcgctgataatcatcatgaaggtggcattttcgccctgtatgcgctggttcgtcaccgggccaaatggttaattttcgtcgcgttgattggtggcgccgctttgttagcagatggcaccctaacacctgctgtgacagtcacatcagcagttgaaggcttaaagggattacccaaactgggggctttttcccagtacccgtggctcgtgcctctaaccgttacggttattttactggttctctttatgattcaagggtttggtactgccgtcgttggccggtcattcggtcccatgatgttgctctggttcaccgtcatcggcatcttcggtctgatcaacatcagtcaggcacccgtcattctcaaagctttctcacccgtttacgccgtacaagtcttattcaatccggctaataaaatgggaattttcattcttggtagtgtcttccttgcaacgaccggggctgaagcgctgtattctgatatgggtcacgttggtaaagccaacatcgacgccacttggccgttcgtatacacgactttgattctcaattatcttggtcagggcgcgtggatgttaacccattatcaggatgcggcatggcgcaatgccaccaatgtcaatcccttctatgccatggttcctgcgggcggtcaaattgcaatgattatcttagccacggccgcagccatcattgcgtcacaggccttgatcacgggctcttataccttagttgacgaagcattcggtttaaagttcttaccacgtatgattatcaagcaccccagtaacgttcggagccagatttatattggtgcgatcaactggctgttatgtctggtcaccttaggaatcgtttggctatttcaaacttcagctcacatggaagcggcgtatggtttagccatcaccttaacaatgttgatgacgaccatcctgcttagccagtggattcacatgaagggccaccgggcgctggcgctagctttattattcggctttggcgcactggagaccgtctttctaacggctagtctgaccaagtttattcacggtggctatttgaccttggggctgaccctcgtcattttcttgattatggtcgtttggttctttggtaatcgccggcgtttgcgttacaaccaggcaaatgaacagattagtctgctagattatcgtaatcaactgatccagctaagccacgatgatcatttgccagtatttgcaacgaacttagtctacttggctaaggtcgaccatcaacaccgggttaaacggtcaattctgtactcgattttagataagcggcctaaacgcgctaaggtttactggtttattaccattaatgaaaccaaccgaccttatgattgtagttacagcattgacatgctaggcactcgaaatatcgtggaagttcaactcaacttaggtttccgtaaatcacagcacattaatttatatttgcgccaaattgtcacgaacttaattgcagatcacagcatcgatccccaatattcccgttacggaatcacacaacctcgtcaagttggcgattttaaatttgtcgttcagaatcagcagatcatggaccttgctagcaacccaactatgggccagttcgatcgactactaattggtggtcgcgttctactacaaaacatcaccccatctcctgctatctggtacggcttagcgtttagcgatgtcttggaagagacgattcctttgttcacgaaaccagcaacagacgccacactaacgaatttgacggtccaccatgcccgcacgccgcaacggaattcgcgccaaccataaataaaagactagtttcaaggaattcaaccttgaaactagtcttttattattaaaatctatcagtcaacacacttatgtttgcggcataaacattaccttagtgtcaataatgccatactgatttcgcatcacttgctcgattctttcactgagctgaaagctggctgccactgtcattcgtggtgacactgctataaccagcgacaaggccactaagctcccagaatactggacatcaattgcattgacctgattcacaccatcaatttgttgaatcgtattaatataatttttttcaacttgtggatcactgtaattaattagctgcaacccactgtcccgaaaaatttgtaacccagcggcaaaaataaagaatccaatcacgatactcgcaacactatctaaccaagcaaatttgaatagtaagaccccacttaatgagattaaagtgccaatgctcgttaacgcatcactaagactatcctttgccgcagccaatagcgtcgaattatctaattgttgcccaccgcgacgattaaagtaccagacgactaacataacgatgctcgcgattgcagctccccaaacagttacaccgctcactgcttgaaaggtgtgtgatttaaacaaattactaacaccactcacaataacttgtaccgccataactaacataatgaccccactcattaacgtgaataagtcttgtaaacgaaatcgcatcaatcgattgcgacgttcggcctcccagccgtccaaagcggtcactttactttgatgtgattgatgattatgaatgccaccccagataccaagcgataacaaccccgatgaaacaatacccgcaaaattattaaacgcatccgcgtgcaaagattgcgaatgaccaatcgttgcaagcactagttcgattacaaatagacttaaatatgctatcgcattgcccaacaaatgccacaacgcaccttgcattcgcttaatttggtcagcttcaatttcttgccagccatctaacacgggatgttgattatttgattgattaatcgtaatcgccccctcctaaacagattccaaccgctcactctaacacttagtcgaaataagtcaaccttataccacctagaacgctgatagcttaacactaacagtctgacttgtaattgtcactatcagcatctttaagcagtaattaattaaagctggcaccttcgaaagtaatccacttcgaagataccagcttacaattatctttgataacctttacgcgcagtcacaagctactgttcatataaatcacccgaccccatacaaagtctgctaccggtaaagtacagttacaatcacactaaggttcacgtttcgctatttgagacgtcacgcgtcgcggctcagaattctgcacacccaaaatgtctaggaagaatgaaacaattggaatcccaatgatcaagccccaggcccctaatagactttccataataatcaacgtaataaaagtgacaaagactggtaaatcagtccgatccgccattagccgtggatgaaggaaataagactcgaaggcgtgaatcaaaataaccaacacgatgatccagacaactcgaatcaagccacccgacgcaaaccccagtaaggttagcggaatcattgaaatcaacacgccagccaccggcactaagcctaagataaagacaatgatcgacaacaccatgatacttggcatcccaataatcatgaacccaatcgtcatcaaaatcgtattgatcgtacaaatcaccagttgcgtttcaataatccgccccagaatcataacgaatttatgcgttaaatagtaaacgttcgtgaagaactttttaaacttcgactgcaagaactggcggccaaagaccatcattcgtccccgcgaaactgcaaagataaaactcaaaaagattgccattaagacgtgcgtaaaaccagtcccaacctcactcagtcctttaataccggtgacgagtaacgccttcccgttttgaatcaattcactactatgaatggcttggttgacccatttatcaatattcttattcaataccgggtgattggtgattgctttagccagcatatctggaatgaccttcaactgatcgaccagggtaggcgccgcgtacgatagcgcaccgataaacaacgcaatcacgccgacgtagaccacaatgacggcaatccaataaggtaagtgcgttcggaggtttaaccaccgactaagcttaatgcccaaatacgcaaaaatcgtcgttaatagaacaactgtcgcaaacccgcgcattaaataaataatgatgattaataacgccaacgttaagtacaagtcaacgtcatcccgcttaaaaaaccgaatgattctatccataatttgcccccaatcgcatgttacttgcattatagcatgactatggattaatcccgcccaccgattccggccttaaattaaatttgacatttaaaataattaccagtatgataggtgtcaataattaaagaacgattaaaagatgagtaattggtgtcgctgttcagcgagtatcgggttggtgaaacggtaccggcacaaccaatgaagatggtcttctccctagttcgttttggtgagtgtctggtgagcaacaaagcaaccagcattaactaaagccggtttaacaaccgttacccgcgttagcaattgccaatcatttggcagctgtatcgagtagactagttcactagcctagaactcaggtggtaccacggcccaacgtcgtcctgaataatgattaatattattcaggacgacgttttttcgttcccaataaaatttaaggagtttgatatttaatgacaactacaactttaaccgccccattccgttttgacgtcgtcggcagcctactgcgccccgctagtttgaaaaaggcccatgaacaattagccgccggtaccattacgcgtgatcaagaacttgaaatccaacacactgaaatcaaacgagtggtcgctgaacaagttaaactcgggctcaaagccgtgaccgatggcgaattttcacgcagctggtggcacttagatttcctttggggcttaactggtgttggcaagtacgactaccatcaaagctataagttcaagggggaccatactcgaacggataacgctgaacttattggcaaagtcgcgtataatcccgaccatccgttctttgctgcctttgaatacttacaatcaatcgttcccgctggcgtactcgctaaacaaacgattccatcaccaactatgttattccgcgataatcggagtgacaattggaccaaattctatgacagctgggatgcctatttaaatgatctcgctcaagcttatcacgataccattcaacatttttatgaccttgggtgtcgctatattcagttagacgatacgacgtgggctttcttaattagcaaactcaatgatcccgaagctgaccacgcggcctacactaagtgggcgaccgatgccgttaaagtgattaacgcagcattagctgacctaccgagcgacttgaccgtcacgacccacatctgccggggtaactttaaatccacgtacctcttctcgggcagttacgacgtggttgcaccctaccttggccagcttaactatgatgggctgttcttggaatatgataacgaacgggcgggtggcttcgaagcgttagaccagatttggaaccatgatgaccacaaacgcatcgtattaggtctggttacctctaagtttccagaattggaaaaaaccactgtgatcaaagaacgagttcaagctgcgaccactaaggtgccattgcgtaatctagcactatcgacccaatgtggctttgcttcaactgaagaaggtaaccagttaactgaggctcaacagtgggccaagttgtcgttagtcattggtacggctaaggaaatctggccagaagcctaattacaacaactaaaaaagatcgagaatcaaccggcgcatttcaagcgtaatcgcttaaaaaatcagccagattctcgatctttttagttaccggttaaaccgggtccgccaccgtgccaagcgcggcgtcgcagtagccggtttagtcgccttagcaggcatgttcaatagaatcacacccgtaataatcgccatgaatcccaacgttttcaatcccgtcaagatttcgccaaacgcccaaattccaatcaggccggtcgcagctgtgccgactccggcccagattgcataaccaacactcagtgggattttgctcaatgcccgtgagaaactaaaaatcgctaggccgtatagtaacatgcccacaattccaaccaaggggtacttaaatccagccgataacttcaacaagctggtccccgcaatttcaacgccaatcgcaataactaattgaatccatgcacgcatcatcattcccccttgatttaaatgttcagtaaaatcgccccgactacgattgcaattaagccactcagacgtgagagactgagccgttcacggtaaacgacgaccgctaaaataacggttgcaaacgtgcccagtccagcccacatggcatacgtcacccctaacggcaggcgttgcattgcaagcgttacaaggactaacgaactaaaatatccaaccaacaccattatcgttggtattaagttccgaaaaccgtttgcgcgctttaagaaaaagctccctaaaacttccatgaaaatgccaccaaataataacccgtatgccatcttaatcacctcactaaaaatttcgttgtcctactattctacggaagtttatttaaaaaggcaatcaaaagatacgcctggctgattacagtttgatgacaaaaataaatcgtattctagactatgctacagcgatctagccatttaatttcaaaattattgttagctgagtggcgataactcattcagcttaacgagcgtacgcaatggttacgattcgaataccgtccagttgaaaaacttttcgcaataaaatgtcaataatcagcatttaagacgtcatccgcgactcaaatctcccgcatctaaaaaaaaaggaccagctcagcagctggtccccacagtcatccttaaatatagaaataaattgagaaaaacatcaacgtggttcccaccatcacgaataggtgccaaataacgtgtaaatatttaatccgtgggaaactatatagtaatgcacctaaggtaaacgcaacgcccccggcaactaataaccagaagccagtgacacctaaatggtcccataactgccgaccaccggcgaggcacatccaccccatcaacacataaatgaccgtttcgacctttttcaaacgtccaggccaaacagcattaaccgtaatcccagcaatcgctaaaatccaaatcgttaataagatcgtccagcccaaccaacccttaatcgccagtagactgtacggcgtgtatgtcccagcaatcagcacgtacacgccactgtgatcgaagatacgaaaaacttcgcgggcgcgcgtaaagtataatccgtgaaataacgtcgaacacgtatatagtacaaacaacgaacaaccatatataataaacgccgcccattcgaggggctgaccatccgcatatgccttgagcatcaaaaaaacaaatgcaacgatacttaaaataatcccaatcccatgagtcactgagttgaggacttcatttgttatttgatactgtcgcgccgactgtgccatgttaatcacctcatatttattgttgacaccagcataccatcacatagtgtaaatatcaatacatctagtttataaaactaggtaattaacaaaaacataactagttcaaaaaatgacactgcgaaattaaccatttcgcggtgtcatgctaagcacaatcttatattcaaggtcatcatgcggtcttctaggccatggatatctataccagtgcccactacgaacccacagcgcttaccactcatcataactgatcagtggtaacacctattcaacctaattatcggcttcttcagcgtgagctgcgacttgctgaaaaatactaatgatatgtttatcggccagctggtagtgcacgttacgtccattgcgtgttcccacaactaattttaattgtttgaggaccgttaactgatgagacacattcgactgtgtcagggctaatcccgtcgccaattcacccacactcagcttagatacggccaaagcgtagataatccgggcacgcgtcggatcaccaagtgccttaaagattgcggtgatccgactcaactcatcagtcggcggcatcagttcagccaaccgtttgacgatcatttcatggtccatttcattttccatcataaactccaatttctaattgagattgtcatgtaagcgtgttacaatacacatgaacagtcattcatatgtttgttcgttcatatttaaattatagccataacaaggataaattcaactaagaagtaggtgattcatatggcacacagccatcaaatacaacaacagaccagcgccttcaagattggggtcgccctaaatactgccttcattgtcttggaagctggctacggttttgcgagcggctcactggccctagttgccgatgcaggacacaatctcagcgacgtcctgggcttactgatctcctggctggcaatctggcttggacaaaaaagcgccaacgataagtacacatatgggtacaaaagctcatcaatcttggccgccctcttcaacgccgtctttttactagtcgctatcggggccatttcagtcgaggccatccagcgccttagtaatccgggtcccgtcgccgaatgggatgtcattatcgttgctgctgttggggtcgtcattaatggctttaccgcattactctttatgaagggccaaaagcacgatctcaatattaagggcgcttttctccacatggccgccgacgccggcgtctccatcggcgtggtcattgctggcttcatcatcttgaagactggctggttctggctagaccccgttgtttccctgctaattgccgtcgtgattttgattggtacttggggactcttacgagatgcgatgaattattcactagaagctgtaccgaacaatgttgaccgccaagcaatcgctgattatttaaccagccagcccaccgtcaaccagattcacgatttacacatttggggcatgagtactactgaaacagccatgaccgtccatctctgtcgttcaacattagctgacaataatgcctttttggaacaactgaacaaggacctaagcgcccagtttccactaactcatatcacgattcagattgaacttggcaaggtggattatgaaacaacggatagttcgatttagttcatcgtgagttaagttatgatacacagcatccaaatcgaatctgtttctgtataaactatctcttccgccttaaacgaccgcatgctattaagcatgcggtcgttttttgtcttacacattttcgttagtttgagacgccacggctcacttccaaactcatcaatattgactagctcggtaaactacgaccgttctcgttgttttggcttcaaaaagatagctaataccaaacttaatatcagtattgatgtgaccagcaagcgaccggccacttcaccaattatcgcagcggggccatcatcaacggcatgtgctaactcgttcagataactcggtactattgtattgatcagaatctcagcaataaatgcaataaacaccgtgatgacgataccgatacgcaatttacctgacttgaaccgctgccaatctgaaaaatacgacaataataccatggcgttcaccagtactaaaaacggtaccaaaaacgttcgtattccaaacggccgcaaatagtcaatgtagccaagtaccagtaacaagaaattgcatcgatacgagacgaccacccattttcggctcttctgatgaagtcgttctgcttccttataataagccagtaagtgatcatcccgcattaaatcgtctagccgaacgtcataaatatcactcaattgaactaaactgccaacatcgggaaaactgtggtcattttcccagcctgagattgttttgcgcgatacatgtaattgttcggccacttgcgattgtgtcaattgtgcgtgcttcctacacacttttagtttttcagagaatttcatatcagactttcgactactccctcatactttggttgccataacgcgattaaaaatcatgcttttttaccatgacctgatcaaaatgcacgttcattcgcacgcggctcacctttcttaaaaaacaacacttgaattaaaaagccaatagcaacaattacaaaaacaagattaatcagatttgtgccatttcgccaaaattcgcgacctaagacattaccgttaacaattgctggataaacgttagcgcttagcaatagtaaaacgattgcagcccagaatctgtagtatttgtagaaaacaagattaatcataaccaatcactcctaaatgtcttacttatatttgcaatttataataggtgtcttatcagataaatacaaccttcttaagtaaaaaaactagtctgtattttccagacatgcaattaacccgctcatgctgggcatttagcacagtataaccatcagtctgatgcagtgagcatgatttttgtggataacgcttattcattcaaaatctatgcaccaaacgctataccgtttactgaaacgttatggtactagaagtagttatcactaaccagtatctgagtcagtcacaatacactgctaattaccagtcacaggttcaacgataccgcaacctcagcggtatcgttttttcaaatattcagcatttttcgacgttcgtacgttaaattaagacattaacgcacattgcagcacacataacgtcattcattatataatttaagtaatatttattaattcagataatctggttcacttcattcttagctaaccacctaggaggcacttacatgagcatcatcaatcgcgttatcggtatcattatcacgcttatcttgttatgccaatggttgcttggctatcaattaccagctgccatggcgttcttcttagtggcctggctgattggcttggtaacgatgtggctgttgccagacacgacgacgaccgctaaccgctagtcgtgtcagagggatacaaaatcaactcattctaaaacacgtcataagaccattacaacttgctcttgcgacgtgtttttgctaacttcactattacctagaaaacggttagactggttctacacgccagcatcaccgaccattcaaatatgtttttgccgcttaccctcattgtgaacttgcgcttcatattgcgatggaactaataatcacacttcccataaccactccggattaaagcccccaccttgcttacattcacacattgatactcacaaaaatacacaggcataagcaaataaaaaaggccagcatccgccagcctaattctacctaattcaatttaatcaatcccgccgccagcaaaaacatgtgggtgacgactggtccaacgaaggtcaaaccatgtcggtgtaaatccttcgcaacgcgggcgcccaggggtgagcgcgtcggtaattcatcatcgggcgccggcataatgattggtgtcgcatcgacaaacgcccacaggtagttgctaaagctaccatactcggcctgtaattgttgaatagcacgcgcatcttgaatgattgcacgtaacttacgaccattgtgcatcactttgggagtcaacatcagccgttcaaaatccggttcgtccagggcggctacggcgtctacccgcagccccgccatatgttgccgcaatactggtaactgactagccgcgacccgccagcctaaacccacttgtaagattccaaccactaacaattcaaataaaacgtgatcatcgtacgtgggagtaccgaaataagcatcgtagtccttaaccccattcgctgtaatatcgtcaaaatcatccggactaatcattattcgataaccaatagccattctcaattcgacctaacagcgtaatcaattgcttggtttcagcaacatcgtggacccggatgatccggccacccttaagcatcatcgctgcttcagtgaccaacgtcattggtagccggtcttccttcttcaggccaagcaatagacctaagtaacctttccgtgaaatggccaccatcattgggcgtcgcaaataattaaattcatcaatgttacgcatcatcacgtaatcctgttccccatgtgcgacttgtgaatagccgatcccctgatctagagcaattcgttcaatatcgatgccatgactcgtcaatgctgccagattttgttcaaagaaaccacgcatactgctcgtcagatcggtatattcttggtcacgactactgtgcatagtcagtaagccgacgcgactgtcagccatcaatttgagcttgcgagggtcgtccgtaaaggcgttcacatcgttaataatgctgacaccttcttccaggacggcttgcatgacatcatacttataagtatcgaccgctaagactgcttccgggaaacgagccttgatggcgcgaatgtacggcaacgtccggtccaattcaacttgcggcgtgacttccgtgaagcccggccgtgtcgtttgaccattaacttcgattacgtcagctcctgcttgtaacatggcatccacgtgattcagtacgtcatctttagtcttgtactggccaccgtcgaaaaaggaatccggcgtaatattcatgatgccataaatcatcggcttcttggtgagattaaaccggtgctcacccgcttgccaaaaaacatcatattgtttcataatttgggtcaattgaatttgagtcgttgcttgatccgtaaagactcgcgaccattggtgggttaactggcgaccagctgtctggttcaacaagacggtcaactgttcaggactcgccagcacgaccccatctaattgctgacatagttgggttaatcggagctgctgttcccgattataatcactaaaacgcaaaactaattgttgttgtcgttgaacttgggcattcaacgcctgactcgcaaaatccgttgcttgtgctaatgaactggtgatatcttgtactaacatctactccaccgatccttccaatttttaaagttttgtgatcaattttaaggcggcccgtccccggtgtgtcagcgggatgcgccacgttgctggtaattcggccaaagttcgaccatagcgcggtagccagaaaattcggtcaaatcccccagaatagcgtccaaattgataggacgcaatgtagccggtgatcgaagcttgtacggccaaggtccgcccatctggccaggcagccgctaacgtagcacgcatcaccgcttgccgctcgttgtcaggaatatcgcgtagggccgttaaaatttcctgattgcgatcaaagccgctgactgcaacccctaagtcgcgcgccgtggtcacacctaacaagtttggtaacgcggaaatctctaagccactatcatctgcgataaccggaacccctagctgttgcgccccaaaacgagctttagcaaccgcgttatcgacatagctcgtcgccgtttccacgggaaattcgagccgcggcgccactgtcaagtactgacgagaagtcaagccataataagccaaacacgcgatcaagtcgcgacttttaccagcgttgttggatgcgatcaaccaagtcctcattggcttaaccccagccaaccagcctgttggagctcacgaatgacataaaatgaccccgttacaataatcgcactattactggttgcttgctgctgagcttgcgttaacgcatccgtgatcgtcgttgcagtcaataagtctggctgtcgttgcatcgcagccgtggtcataaaggtgggcgttaataatgcggtcgccgtgtcggccagcttagtcgcggataacgctcgttctggatttgcgggcgtattcgtaatcaggacgtcagctaccggtaatagttcagccagcattttagggtaggccttatcttgtaagaccccgacgatccaaatcaatttacgaccagcgagtaattgcttcacacttgccactagtgctgccatgccatccggattatgcgccccatcggcaataatgacaggttgctcctgtaacacggtcaaccggcctggcaaggaaacttgttgcaagcctcggcgaaccgcactgttcgtcaagttaacttgttgctgttgtagtactgcaaccacagttaaaaccaaccgcagattttgtagctgataggtgccactcagtccgaccgttaattgcgtccaatcaaaaagctgactgtgcgcatcaacgacggtttgcgtgagtgtttgcccagtcaccgtcagttgcgcgtgcttagcggtcactagccgaacaccttgattgagcgcttcggtctgcaaaacagccagggcttctgggtgttggtcagccaatgtcactgctgttgtatggggcttgatgatttttgacttattttgcgcaatcgcggtaatcgtgggcccaagaatggcggtatgatcgagggcaatcttagtaaataccgtgagttggggactggctaaggcgttagtcgcatcatacaagccgcccaaaccggcttcaatgaccgcccattgcacgttttgattccgaaaccaaacgacactaatgagaaagaaccattcaaagatggagacatcgctagctgtcagtcccatattttgcagaaccggtagaatctcacgatacgtatcgataaattccgctggactgatccacgtcccattgcattgcagttgttcacgcgcatcattaatcgcggggctgctgaagcggccaacttgatacccttgcgcccgcaggatactggctaacatagctcccgtagagcctttgccattagtcccagcgatatggatcacatggtaataatggtcagggtggccaagatgtgccatgattcgccgtaataacggaacacgctgatgattattggctaacatggcttgatttagttgggctaataagtcctgataatgttgttcaatcgtccctgtatccactcaatcacctactttgcgattcgctgtaagaattctcttttcaagtctaaatccgtcttgaattgaccactgtaatagctactttccgtatgcacacccggtttgctaacaccccgcatctccatgcacatgtgccgcgccgtgattgagaccgcgatcccagccgggtcaagaattcgttgtaattctgttgcaatggaaactgtcaaccgctcctgaacgttcggctgttgactgcaatagtcaatcaagcgaggaatcttactcaagccaatcacttgttcatgctgcggcacataagcaacttgagccgtgccaaaaaatggcaaaaggtgatgctcacacatcgaatagaatggaatatccttaagtaataccatttcagtcggatgctcaaccttgaacagtttataattatcaaatggtgcggcggtcttagtagcgaaaacttccgcatacattcgtgcaacccgtgctggtgtttctactaatcccggtcggtcaggatcttcaccaactgcacttaaaatttctcgtactgcatgctcaatctttgcttggttcttctcatcaatcatctaactcactcacatttcttacttttttaatccaactctgatcctgattagccgcaatcaattgggccacttgtggtccaactaacacatcagttttggcgatttcagcagttggcagtagcacaaagttgcgcttagctgcctgcgcatgcggaatcgtcagcgtcgctgtgttgatttgccggtcgccccaaaaaataatatccaaatcaatcgtacgtggtccccagtgaaccaagcgttggcggtggcccgcctgctcaattgtatgtaattcatccaatagttcttctggtgtcaaattagtcgttaaggataccgaaacattgtaaaaattggcctgatcacgctttccccacggttgagtctcataccaatgagattcgtcaatcacgtttaccccattgacggctcgtaatcggctaagggcttgctgaatattttggacgcgcggatgaatattggaaccaacactcaaataaacccgttcttccctacttgccattcggcgtcccctccacctcaatttccacatcatcaaagattccaggcattggtacgctatatttacgaattttaatattgattgcatccgccgcgggaaaacttgtcaataacgtctgcaataagtggttagctagcgattcaatcaacttgtatgaatgggtcgttacaaattcatcgaccacgttacggaccgccgcgtaattgatggtctcgtgaacgtcatcgtgttgaaccttggtttcgataggatatttaatggcaatatctagccctagttgttgaccattacgccgttcttctggaagtaccccgttaaacgtgtgaaagcgtaaattattaattcgaatcatgcccataagtatcccagcctctttcttgctcatttttacttataatcatagcatgaaggacgctcaatatgatagtaatcagccaaataaccccataaaaactagcaatcgttcgggaaccgaaaaaagtgcgttgctaacaaaccggttcatcaaaaaagacgttgctggtcaaaaaaccagtaacgcctttgtcttagtttaaagcagtcgtacccccaccatgaactctaggaatccgtattcgtcccatcattaaaattaatcaaattactgaggtaatggctagttagaccaggtgtctgcttcacaatataggtggcgagcggtgactgcgtcatttgcgtctgaataaagctcgtattgacgatgttcgccaacgacaacgcgacaaaaataaccagatacatcacgacaaatgacacgattccacccgcaacactgttcacttgcttaataactggtagccacgtaatgctacgtgaaacacggcctaacaaccgaatcacggaccaccctaacgaaattaacacgaagaaagcgaccaggttaatgatcaacgttgccgccactgaagcttcaattaaatgtaaattcgtcaatagattactaatcattgtccctaacggctgatagagtagtcgtgcaaacaataggacgacgaccgtcccaatcagatgcaacatttcaatcacaaatccgcggtgaaacccgcgaaaaattgcgcttgctagtaaaattaaaatcacaatcgtaaatatcatctgcgtgccccgccttccgcttttcaggtacgcctattttaccagctttcgtcagtcagtgcagtgttttcacctagtctaaaccttatcttaaagacttgacgacgaccgtttctttcggtaaagttaacagtaatggttacgatttaaagagaatggggttacaatacatggtcaaccgacggatatggctttatttggcaataatactgggactcagcggcctattagcaggctgtcaaagttcgagcacccccagtaaaacgactaacgacaaaattaatatcatggctagtctcgacttttatggtcaaacggctaaggcggtggcaggaaagtatggtcaagtgacctcgattattgatcgaccgagcgttgacccccacgactacgagccgaccgtcaacacggctaagcaggctagtagcgcccaattaatcatttacaacggcctcggctacgatgactggatggaaaagcttactgtcaacaaagccaagggcgcccgggtaatcacagtgggaaccgacgtggctcataaaactgacggggccaacgaacacgtctggtacgatcccacaacgatgcccaaattggcaactaaaatcgcaacagaactcagcaaaattcagccgcagcacaagcattattttgaacagcaggcccaaaagtatcagaccaacgctaagactataaccactatgatcaaacaattgaaacagcatgcaaataatcagcgtgtcgctgtcagtgagccggtctttgactactcattgaaggcaatcggctaccgaatcagcaatacgcatttcgcacatgcaattgaagagggttccgacccatcacctaaggatatccagcaaatgcaacaagacatcaagcaccaccggattgcctttttcgttgaaaacactcagaccgatagtaacttggtcacgaacatggtcaaactcgccaggaaatacgatgtgccagtactgaaggtcaccgaaacgttaccggccaatcagacgtatcaaagctggatgctcagtcaatatcgtcaattggcaaagattcaaaaagcaacagccaagtagaagcgccccggttagttgggccaagtcctgtgattcagtacgatcacagtcgcgctacgaaaaaagggccgccattcttgattacaagaatggcggcccttttggcctaattacgactaaccgaccgattgtgcaggcactaatgtctaattagtggcgttcaaagcatatcccacttaacttcagtcattctcgcctggtagtcagtcaccgtgattattaatgcgactgcttgcgcccatcacgcaaaagtaacgcaagcacgaggccaaccaattcaatgccgagcatcatccagaagaccgtatggtacccttgcaagttcgcacgcaacgttgaggctcccgcttgtttctgagcaagcgtcacgttggataagaccaaggtcgccacggccacaccagctgaaccgagaatttgacgaaccgtcgtaatcacagcggtaccgtgtgaaatcagttcatcgggtaatgaattagcccccaatgtgacggcgggcatcatgacaaaggcattcccgccttcaattaaggcagccagcaaaatcatggtgagcaggttcaactctgaattgatcagtgctaagatcagccaaccaacaacgatcatactcataccaagtaacatgatttgtttgtatccaatcttctctgctagtttcccagtaagcgggttcaaaatacttagaagcaccgcaccaggcaccagtgacatgcctgaaacgaatggcgacaccttcaagacaccctggtaatagagtgggaagatgattgttacgacaatcagcgccacgtacgagattgctgttaggaaaatggctaagtcataattaaatgtttttaagacccgtagttccaataacggcgtctccaagtgaaattggcgataagtaaagtaagccaccgctagtactgaaaccgctaataacagccaaccgaacgtccagttcacattgggtttaccaatctcattcacgacgtataaaatcccagcaaagcccagtaacgtcacgattgagagcaaatccagctttgaaggcttattgaccatcacgtccttgatcgttgtgaaactaattaggatcaacaaagttgccaccgtgatgaagacggcaaacaatccgtgccaatcggtaaacttcaaaaccacaccggaaataatcgggccagatgctaatgctgatcccatgaccaacccggcgacacccatcgtactgccccgtttttcctcgggcgtaatcgtcagtaaaatggattgatacgagggaaacagcacgccaactgccgccgctttaattaggcgaccgaccatcatcacaccaaaactgggtgcgaaataaataatgattgaaccaatatcgaaaagcaccaaaacggctaagaataatttcttaaacccaatgttattcaacaaccacggactgattggcatcatgacgaccattgtcaacataaagccggtcgttaaccattgcacggttgaggccgagatgccaaagtcgcgcataaatgttgggtagaccgtcgacaaggaagactgactgatcgacatggtccaagtcccaagcaacagcgtaaaaatgaaccagaagcgtcgacgccccgtcaacgttacattttgattagctgtctgcattcaaaactcctccttactttagaacagttatcaactactaatatccattgtaccattgaaaccaatgatgtacaggctaaaagtcagattggcaacaaaaaagtttgctacaccgaataaagagacgtgcacaattagcttgtaacaacacccgcgtgaatgattgttaaatatccaatctgttaaagctctaacggacagattcattaagtcagttggcctctaatcatcataaaatcagtcccaaccagggcactccatcacaccgaaaagctttgcagccaaactaaaaatgggttgttcaagaatcaaattcttgaacaacccattacctacatgttgcatcgatattcttaatttattcagctaacatggccgcactaactgcctgtagctgcttcgcttcaccagcagtcggtttagcgggtttcatcttctttaaggcgatcactgcccgatattgaagttctgccacattaatatcatcccgcaaatcataatgagtaattgtgacgaaggcggagttctcgtaaattttttcaactttagcataaaaatcataatcggtattgccgttcttttgacatttaacccgatcccccacagaaatctgagccataactatcactccacttcataaaatatgataataacatagcacgtaactgctagaataacaattattgctcccgaatttacatgatttttacatggttatgacggatactgtccaaattaaatgacattaggcccagcagccagtatttgcggttagtaatggccaagttcgtaaaccaatacctagtaccttagactgagctgaatcaccttatcgattgataactagcattcgatttttctaaccaaccaaacgtacgccatttacgcctgactctcaaaatccgagtgctactgtctctcgttttgacaactcccccatcactgccagctaccccaaatatgagcattgagcgcaatcgctaacgattcaactcaacggaaacttattcagtacaatgagtgtgattgcaaccaataagtagatcgtgccggtgattaatagtatgggttgaattccaaatgcgctgatgagtaccgggattcctaataatccgacccgccgtttgaatttcaaaatttagtcttagttcgcccagtaggctaatttttggcaacaaaaaaaggaatcgaattaacgattccttaggtgtatcaaactgtagtgattatcggttagggctgtttgaattatgctatgcagatgagcgtttattcaatttgaatcaatttcaaaatttaatatttttaaaattaaaacacaaaaaatgatacagagaataggcttgatgtttgtcaatgtcgcaattaaagcgttttgataatcattatcgtccttattgacttcgactctaaaaaaatcaaaacatttactaactcctaggcccgtcagcaaagcaaaagtaacaccatgaattagaaaaatcaattcatggttctggcctaacttaatgctcaaaataataaaagagaatgcagccattgcaccacaagctatattattatctaaagatttgatcacatttcttgagaactggacagcaattattgtgttggcaaaaacttgtaatagctgaactaatacagtcagctgatttatcaaaacagcattacttgcaacaaagtgttctaagtgaaagataacgacaaaaaatccattgtcagtcattaaggcttgtaagatagtttcaagaaaaccattaacaacaattattggaaaagcagctattaatgcgtcttgcaaataattaaaccattttaaagtactgattctgtaaagccaatcaattatggactgaatattatatttcttcattgattgtttcaccatttaaatcatacaaaagtttcattttcccaagttagctcaatgtagcatatcactccatcaataccttacttttttattgactagaaatttctcaataccctttcaatagtatccactaaaagagtcaggcgcagctaaatctcaacaaaaaaacaccacatattatttaacttatacgtaataatactagttctgtcgacaatatatttcatactttaatagaatttattataaaatatcgaaatggaatattacacgattggctaccgcaaaatccctgaaaatggcacttattcaatacaagttagtttcttatctttgtttaattcaaaaataaacttgcaaaccagactcctcttaaagatacacgttaagattagatatacatgttgtttttaaatttctaagattttagtaaagtgcaaaaagatttagtttttaaaatttagacagtcataacgtgtcgtcacgttatttcgcccgcgcaattcgaatttgcacatggttacccatgcgctgaataatttgataatagttatgctcgtcaacataaccaatttcaccctgattaccggtgtgaccgcttgacaattcacgtgcaattgcttaaacagcactggaacgattcaaataagcaggccagttggtgccccttcactgtggtcgtaatccgccgtgcgactaggttattttgcaaattactatgattagaagatttaattctaactgactgcgatcgtctcaactgatttacgctttgaccacatactgataatcctaatacacccatcaatagattaaaaaacactaataacagggcgtaactttaaaaacactaaagtcatgccctgttattaattggccttatataacgatgcgacttatcacgccactctttttaatttgtttgttaccacgattattaattatcctgtttatttaactgcttcaaccaagtcgccgttgcaagtaggcccacaactgcttcaaaatctgagcgagtatcgccaacgtacaagagttccgcggcgtctaacgacttagtgcgcatcaattgtcgcagattgtcagctttattaggttgacaatcagaaccatacaaccgcgtggagaaataggacgtcaggccagtcacgtccaaggaaatttgacaactcttagccgccttacccgtaatcagagctagcgccaccccttgctgctgcaacagttctaaaagtgtgacgattcccggatacggtgctgacacccgtaaatgtgcgcgagcgtattcttgataaaaggcggccaaagcgaccggccaccgttgaccagccactgctttgaccatcccaacctcatttagcccaaacgtctggacgatagcttgcttggtcagttcgtgctcaacgtacggtgcaacgctacgacgaaagacgtcaatcaccattggaatcgtcggcgcgagcgtgccgtcaaagtcaaaggcgatcatcttaagcatgcggttcaccttgattaatctgccgaatcacacgacaaggattgcctaccgccaacgaattagctggaatgtctttgacgaccacactaccggcaccaatcacggatccccgaccaattgtcacgccgggaataataatcacgccaccgccaatccaacagccatcctcaattgtgactggccgcgctaacgtctggcaaaaatactgatcactatctggctgccagtccgcacgtaaacgttcatgcagttcgaccggatgggtagccgtataaatttgaacatttgaggcaatcaagacattattgccaatggtaatccgattacagtcgatcaaggtacagttcatattgattgaaacattctgaccaatcgaaatattacacccgtagtcacaaataaatgggctccccaccgaaacattcgatccaatcttggcaaacatagcctgcaatatcgtacgtttctcacttttttggtcataggcgagctggttatactggcttaaaagttgccgtgtacgccgttttagctctaaaaatactggtgcgtgtgcatcataggtctgaccgctcaaactccgctgtcgttcatccatcattaagcacccctttcacttccaagcttaaaaaacgaatcgttactattcaagtcacgattcgtttctttagttatagtcgttttgctaaggtctcaatcacatagaccacggggacctgggtcgttatattataattaccattaattctctggtgagccaattgatatgaaaaattccaatcggaaagcttcgctagcgtggattgggactggttagtaatgcttaagactgcgcaccggcgttgttgaaaatgctgaacaagtgcaattagttctggggtttcgccactctcagataacgcaaaaacgaccgtatcgtgaatctcaaaagtattcactggataattactatcctcaagtccaaacgcaaccttaccagcgttggtaaaacagcgcgcggcatagcgggccaaacttcctgaggaaccaatgccgacaaaaataaccagcgtggctcgacgcaaatacgtgagcgctggcatcaacttacgttcatacgcgctagaattagtttttgcaaaaaagtgtgctagctcactgacgtcgctcttgggctcgtaggtggacaactgttgttgttcacttttaagagcccgtttaaaatcacgataaccttcgaacccatttttaagacaaaaacgcaaaatcgtcgaggtcgacacgtgcaactcgtgagctaactcacgaatgctcatgtagccgaccctatccatattattaataacgtacctgtaaatttccacatcagtttcattatatttttcgagctgctcataactaaacatccgccactaccccccactccaataatccgttgcttggtcaccataatgacctggtttgttcgaccctcattagtcatacaatcgattggacgcgcaactactatcaatagcctactataatcagccactctgatcgcgctagcaaacgaccaacaccgttaccagtaatcagtctttatctatttaagcgcgaataccccgtcattacaagttggtagcaaccaaaaaactaggctaatcactgacaaacgtcagctgactaccccagtttctttagcgtcaattttaaaaatgcgaactcgccagtgcctgtccatcagactgccccactttaatgtgtgggccataaaaaatcaatcagtaaccggtcgacctgcgcattttcatgtaactggctgtgttgcgcatgtttcccagtaatcttaacctcgcgataagaacgcgcacgcgccgcaactaagtaccgtaaagagcgtgatgaagcgttactgacggacccatccgaatgcgtcccatcgcccttatcaccataaatattaaggacccgtacttgctgacgtggataaacccgccgtaatcctaataactggcggtaggccggtcgcaatttattcggtcgtcccgcagcgttcaacgtcatctggttagggctgtcgtccatgcctaaaataccattgaaatgtccagcaattgcgacttgttgcctgagctgcggcaaccgctcattttgcgcattcgccaatagataataggtaatcgccatattacccatggaatgaccaaccatgttaaacgacgtgatgccataagttcgttggagcgccaccaccacattttttgcccagcggcccacggttggataatctgaagaccggttattagcaaagttcacttcgacaattggtcgataatcacctgatctaaagtggcctttcaaagtcaccgtcccgtttttagcaaccatcgcgcgtacaatagtttttgttttgccggctttaacgatagcatctgccatgtgcgtctcagcatggtaactactgccccacccatggaaaaacagtgttggaatgtagcgatgcctctgagtcgtaaccggtttagtcaccccggtcgtctctgcacgaccacaaccaactaataataacagcaggcctgctatcagcccccataatcgtattcttttcaataactttcccctgaattctatttaataatctattcactgttagttcgtcatttaaatttgtgctaccccgcatcggcgtgcatgtcgtctgagcgttaacgcttattttagcattcaattaaggctcatgacaggaattacaaccaattaggccgatcacccgccgtaccaggtttatcaacccctaaactgacacgctgataattttcaggatgcaccattaatttaaagactaaatcggcaacactcgctcgcgatacctcagttcctttgaaaggttctgcgccgattgtcagttcataatcaatttcggcagcatccgttagccaggctggtcggatctccgtataaaccagtttggaagcactaagcaacctcgctgcttctcgaaaaccgggtaggaaatcggcaatggcttgttcgttccacgcgccaaattttcctggcacctcatgatgggcgccgagtgcgctaatgaagatcaaccgttgccgctgagttcgggccattgcggccaaaatgctcttcgtctgggctgctagatcagtcccaccaacattggaatagactatgtccaccggtgccattgctgtggcaagttcatccgtatcaagcacgttgccatcaatcagcgtgacccgtggttgctcccgatactgggctaaacgttccgctcgacgtaggaacaataccagttcatcgtcagtttctgctaataaccgttgcgtcagcttcctggcaatcccaccattagcaccaataatcattattttagtcatttctattcacctttcttagatattcgtggcatcacttggaccgtcgcctgccgcggtccacttgctagcatcggcattaaatacggactaccggcatatttttgtcgataagcttggtcaatctggttatttaactgttcatcacaaatgggcacaaaattcaccagatgattgctctcggccaagtgaatccggccagccctttgggttacggccgatcgataccagcgtgagcgcggaccgttccaagcacggataaatagttgctgccctaccacgaccgaccaaatccaggtcggtgtcccgtatgtctgcccatcactataaaatggggagacttgaaaatcatccgccgtgctaaaagcggctaactgtgctctggaccactgcatcgtggttacagtggttgacactacgggctgattactttttttcatcgttaacattcctccattctggcaaaatagtggtgcttaattcagagcacttcggttaaatggtgccctgccttgatgcttgacacgttattctctgaataaccaactattctgcactaacctcaagtttcatcttaaagcttgacagcaaccatgtcgaatgcttatatggtatttaaaattatacttaattgtaatagaaagaagtgctttagatggaattacgagttctacgttattttcaagcagtggtcgccgagttaaatatcagtcgggctgctgaacgcttacacgtctcgcagccaacaatttcacgacaattaaaggatttagaggatgagctgggcgtgaccctatttgaacgcaatggccgtcatatcagtctcacgagtagtggtgaatactttgccacgcaggcgaaccaaatcatcgccttagccgataagacgcttgccaacattaatacagccaaagaaatcagtggcacgattgaattagggagtgccgagatgcgcagttttttgacgattgctcagtcgattaagaaactacaacaacagtatccgaaaatcaggatcaatgtgacgagtagtaatgcgaatcagattcgaaccaacctcaaaaccgggaactttgactttggaatcgtcacggaaccaactgacaaacacgacttaaactttatccatctgcccggcgaaagtcgctggggattactggttccgcggcattcgccgctagctgaccatgattacattagcttagctgatcttgaaggccaaaagatcattgtttctgcacaacacggtacgatcaatcaacttcaggattggtatggtgaaagcacgcccaaattcaccatcgtcgccacttataatttactctataatgcctcgttactagtttctgcgggcgtcgggtacgcgttagggattgatggcatcatcaatacgaaccaatccgatttgattttcatcccactaacacctcgaataaccgcccgcactagcctagtctggactaagggacaacgcttgtcggaagccgccaaaacctttttaacgcaactggcgacagacctgcagcaacaaatacctactgactaacagtatcgactcagctctcaccaatcaccacaacacactacccaattgatggctgctgaagacgacgcgcatctaattcacgctaattcgaactaaataattgaattgagcacaactaaaatgctaagctaggttattcagtttcagggaggaattatttaaaatgaaagcagtcattattaatcagtacggtgggcccgaagaactccagatggccactatcgaacgtcccagcattgatcaggacgaggtcttagtcgccgttcaggcaacgagtatcaaccccatcgattggaaagctcgtcaagggttgcttaaaggcatgtttgactggaaaatgccagttgtccttggttgggacgtcgctgggaccattgttgaggctggcgcggccgtgaccaactttaaggttggtgatgaagtctttgcccgcccagacatttatgcggatggccggcgcgggacctacgctgaatatgccgcagtcaaagaagacaagttagcactaaaaccagccagtctttcttttgaacaagccgccgctttgccgttagcggggctaactgcttaccaagtcattcatgaccaattaaagattcaagctggcgagaaagtcttaattcaagccggtgctggcggggttggtttaaatgccatccagattgctaagtacctcggtgccgaggttgcgactactgcgagcgccaatcaccatacgctgttgaagcaaatcggcgctgaccacgtcattgattaccacacgacggctattcaagatgtccttacagactacgatgccgtctttgataccattgacgccattgatgagggcttggcaatcttaaagccaactggccgactcgtgacgattgatgggcaaccaacggcggctcaaaaatcccaaggtcccactgtctccagctggtggttacaacccaacggccgggagttagccatcttggggcagctcgccgttgaaggacacttacaagtcatcatcgaccaagtctttccgtttagtacggctggtctccaagccgcccaccggtatagcgaaaacagtcacagtgctggtaagctcatcatcaacgtcggcactgaagcttaatacggtatcggctccagcctcagccaattgaccaatcgccacattgactgtcaaacgacgcattaaagccttaaaagggcgcttcaagaatccactacgaattcctgaagcgcccttttttaagccccatcgcccgaataacgctagttgtcacccctgcattttcagccgcttgtcccatctgtgcctcggcgtgatacctattaccgccaccgtggaaaaataacgtaggcgtatttgactgtacatacttcatgcggtgttgttgtgccatacatccactgagccccagtactagcaaaaccactagcaaccccgacagccatttcacttttacttgcatgtcctgatccccacctttgattggaacctattatacagggttcctgtcagcgtaagtcaagctttttcaacaattatgggatgacgaacagtgctttcatcatttggatggcataaaaacagacttgggaaatgatcccaagtctgtgatttaatgcgcctgtgctgctttacgttaggtcaatgcttatcactactattcgaccagttaccacgagctgtaattcgtggtgtttgattgcctcgctgatattcttgtttgacggctagttgccccaccaaatttaaatagttgaacggttgattaaaattcggctgaaagaacatatccacgtaagccaaatcatcaatcgtattctgattttgaatcattgctgagatcgtgtttgcagcttgggcaatgtcgtgacgactccagaattgcgcgccgagaagctgacgattctgataattataaactagttcaatcgtgactttggccgtcgtcggcatataagctggccgccaattgccttgatagacggcgtgtcgtactggtagttctcgtctttgcgcggctagataggtcaaaccagttgtggccatcgtgtgatcaaataattgcatggctgaggtggcttgcgttcccatgtacggctgtaaatctccgaaaacattgatccccgccaacgcaccttggcgcagtgcgttagttgccaatggtgtatacgccggctgtcccgtgggattataattgaccacgcaagcatccccagccgcataaatatccgggtcagaggtttgaacataatcattgatcaagatagcaccatggcggtccatagcgacctgcccgcgtaacaattccgtattcggcataaagcccgcgcaaacgacggccagatcaacctcataatcaccctgcgcggtttcaacgatcaactgatcattcgaaccgcttgcgaatccagtcacccgttcattgaggtggatatcgacctggtgatgttgtaagagtttagttgcagcatccgccatttgggggccaagataattattcaaaatatgtgaatgcgaatgaaataacatgacttgttggtccatactagcatagctttccgctaactcggtccccatatatccggccccaacaattgcaacgcgttggttggcctgtagagattgataaagttgttccgcctgctcgtagtttttgcacagtaatactttctcatgatcgatacccataattggtggcacaataactgatgaaccagttgccataatcagcttatcataagtgtcatcaaagacttcgccagtctgcatattggcgacctgcaccgttttatggcccgtatcaattcgtaaaacattatggcgggtcttaacttgagcgcctaactgcttcaagtcagacggcgaggtgtaaaacatgtcttccaggtgttggatgacacccgttaagtacaaataaatcccactcgaaacaaacgaaacgttatcattccgctcgtaaatcgtcaccgccgtctccggatgacgtgttaaaatttcgcgtgccgctgccgtaccagcgtgggtactaccgatgatcattactttcatcttaccggatcttccattcttccagatttgccacgtaattagtaagtgggctcaacattaaccactgttcaattaattatatcgcgcaccaaatcatttgtatatgtgttgatgaaaacaaacctagttggcccctcgttcaaacagcctagctttacaaccactgattagctttcgccacacgaatcgcttctaatcgattgtgaacccccaatttgctaaaaatggcggataagtaattacgggtcgtccccgctgacaagtataaattggccgcaatcgtcttcgtgggcaaccccttctcagcttcgaccaaaactgctagttcccgttcggtcaatggattgttgtctgctgacaacatattcgtgactagctcgggcgcatagatggtgcggccggtcatcacagctcgaattgcatcaattaggtcatcactcggactatcttttaacaaatatcccgcgacattggctttaactgctcgttcaaaataacggcgttgcgcaaaagtcgtcaaaactattactttcgtggctagctgcgaactgtccaatagatcagcaacatccaagccggttatccctggcatttcgatatccagaattgcgacatccggttgcagttcttgcaactcctgccaggcgtttatgccgtctactgcgctacccaccacgtgtagatcatcttctaattccagtaattgggtcaaggcagaattcaacatgctttggtcttctgctaagtataaagttatcatgctgactcactactcctttggtaaagttaagatcaactgggtgccgcgccgactactcgtgatggcaaaggtgccctgtttagcttgcaagcgggttcgcatcccggcaatcccgttggcgccctgacgaatcaaggttccacctttaccgtcatctttcagcttaatctgataaatttttgccgtctcgacaaaatcaatccgcacctcgtgcgcgtgtgcgtggcgcatcacattggtcatggcttcaactaacaccgccgcaaaacaactttggaccgttgtcggccacttggttgcctgtgtctcaccagtggtcgtcgtccagacaccaaccgctgctagattacgagtttgggccaataggacttctgtgagcgattgttcatgcaaattattgacgatttcgcgaactaactgtaaattttggcgactggtttgttcgatttcgtccaattctggtgccactttctccggtgctttgacgagtaattttttagctaattccgttttgagtgtaatcattgaaaagctttgtccaagggtatcgtgcaagtcacgcgcgattcgttcacgctcgttacgttccacaattgtttttaatcggcggttagtttggttgagttggcgctgtcgttcaactgaccacgaaaaggtatacgcgagtatgggtgataacaatggaaaaactaagcccatcacgtcaccattatgccacccaaacacaccaggatattgtaaatagtctcgtatacagccaccaattaaaaaggcataataccctaaagcaaaaccataaaattctcgtttaggacgacgaccaagtaaaaagctcacttgccagccgggaaagatgatcataaaattgttagccgcaaataccgcaaacagtcccgtcacaactaactccgctggcatcgtcactgcacgccaatgtggcttctcgacaaccaagatgtacaacacaagaaaaccaccaacaagcaatagccaaagccaatcatgccaagatttaacgggtatgtaagccgcaattgtatacggcaaataggcgagccacacgtagctcgtccattcaatcgtcttcaatttatttttatgatgcgtcaacaacgccattcccccgtttaagtccccgctgaatcacccaactaacaatcactaataggccgcacacccacagcccgataccaagcaaatcgattaattttagtgtaccatgggtgccccagttgaccaacaaatcgttcacataatatgttggcagtcgtttaccaatcacctgtagccagcttggtaataggctaatgggccaccatagaccactaataatggccattggaaaggtaattaaattactagcgacactcaacgtttcggcacgattcaaaaatgagagtccaacgcccataagcaatgtcggtaattgaccaatcagagcaattccaagtatccctagccattgaaccacggttaaatcaacgtggttcacaacgaccgcaatcgcgcctaaaataacgaccgttaacgcattcattcccaaactcatcatgccaatcgaacgatagtacggtactaccccgtgtggcgttaaccgtagccaccgtaatagtccccgttcccgatcatgcattagaatctgggcaatactgaacagcgtactgatcgtcccactataaacgatcatactgcccatataagaccgattaaaaagtgcgatttgagccgttgtgccaccggtaaccattacttttgtaaataacaagtaaaaagctgctggcatcaccaaggcaaaaaactgaaacgctgcgtttcgaataatcaaacgccgtgcatcaaatctcagttgagccattaaaattttcatgctgagactcccttcgtcagatgaacaaaaatatccgtcaatgattcacgactaattgagacttgatgcaactcactgattatgggcatcatcgcttgcagcgtagcgtcaccgtcttcactactcatgcgtagttcgtcgccttgcttagtaaccgcagttactgccgttaaatttgtaaaccgatccgctggcagtctcgtttggcaacgaatctccacttgttggtattgtttttgcaacacggcaaacgagccttgaaagacaaagcgcccgtccttcagcaacataattcgatcagcgatggcttcaatctccggtaggtaatgactggtaatgataatggttttaccagcggccttcaagcgcctaatctgttgccaaaatgtctgttgcgcattggtatccatgccaacggtcggctcgtctaaaaataacaaatcgggatcacctaccagtgccaaagcaaaggtgactcgtcgtaactgtcctccagataacgccgtcaagcgttgctgggctatgtcttgtagcttcaaggtggctaataatgcttgccaatcaaattcaggcagacgttgtgccgcagctagccttaacatatcacgcaccgtcacgccttgaattgtcatatcaccctgcatcattgacccaatctttaatcgcgccgccaggctaccggccgcttgcccgaacaccttgagatggccctgctgaactcgtttgattcctaataacaaatttaacaacgtcgttttgccggccccattttcaccaatcaagccaacaatctcgcccggcatgatcgtcatattaatatcagtcaaaactgactgttgaccataactaaatgcgaccttagttgcttcaatcaacggtgtcattatccccgcctcctttaatgactatagtgtacgccaacgtaatcgggtcgagtagtcgcgtttgtcataatgatcaggtgacaaatgtcattatttcaacagtattgataagttagcataattctttagaaaataacccagacaaaaagtgagcttctggatttacatcaaaagctcatttgaatcacaattaataacgctagttaccgtgctttcaatacccaatgtgccaattgcgaaacgataatgattccaataacaccaatgatacgcaaactcaatggcagtgttcgaccataaatgagccaggcagctaacaccagtaattcaccgccaaaaattacaaatttcattccaacacatccaatccacttttcgctagtatacgagccagccaatacaatgtcgattgatctgccattcctaactgagggtggtcgctgattaactgtgatttcacttcgtttagttgttactcgcctacgtatgtatgtctttaatccgccattctccagttggaaaatgattagtccatcaaaagttcaatacattcaaaggtcattccaaccgttaaattagttttggcactgacaccggctcttatgttaaacttaatcaatcacaacgaaaataaggaggtcgaccattgttaattaagtctttcccgcctgccgagcgaactccgcaattgattagccaattaactcaactctggcgacagtccgtcgacgccagtcaccactttctaacgcccgctgaaatcacaaccattgagcacgaagtccccacagcattacgaaccgttccacaactgctcgttgcagtggatgatcaaaataccccaactggtttcatcggtattgatggttcactagtagccatgctttttatcgccccagccgctagtggcgctggtattggaaccgccttactgcaaactagtattcaggattatggtgccacaacgcttacagtgaatgaacaaaacccacgggcgcgtcaattttatgaacaccgtggtttccaagtcactaatcgccaaccaactgatgatcagggccgtccatatccactattaactatgacttacaactgtgacccattaaacgactgacttgacaaggtcgttttttttataaataatagacttgtccactatttataaaaaaggagtgctgactatcgaatattttagtctaactaaatatattgcgggtatttaccgcgaatccaaaaacagcatcaacacccaactacaggcgctgaacattcgggcgaccgaaagtgacttattactggttgtttacgatcacccggcccaaactcaaaaggacttggctgccagtctgatgctcgatcctagtttattagctcgaactgttcgtcaacttgagcaacgccaactcgtcatccggtttcgtgatcctgccgatcagcgtagtctacgaattaacttgacaccggctggtgaacaaattgctatcgccattaagaaaacattgattgactggtggcatgacttcttcactgctcatccagaagtcaacgagcaagtgtttacgaaccaattacaacaagtttacctcgccttacaagagaaaagagattgaaatcgtcattgaaaaaattcattaaacactttggagtcctcgtaattggtatcctgtgcatgtcagctggcgtcgcactctctaaattatccttattaggaacgtccccaatttcaagtattccgaatgtcattagcaatattacggcaattccaattggccagttgacaattgcttttattttcattttagttctactagaagccatcgttttgcgccggcagttctcctggcaaaacttattgcaattaattccgggtagcctgttcggttggttcatcgatgcttttgtgcggtttttccatagtcttcctaatcaaacatacatcgagcaactcggacttgtcttaatgggaacggtgctcttatcgttaggtgtctttttagaagtcaattcacacgccattatcatgcctggtgaaggacttccgaacgccatcgcactgatgcatcaactcaagtttgccaaagtcaaagtttataatgatttcattctgattggcatttcactagtcctggcactcagctttactcattctttagcgggggttcgggaaggtaccctcattgcagcctttttaactgggcgactcgtaaatttctttaccgaacatgcaaatcgatttgttgcttggatgacaccagccgctgacgcgaacaactaatttccagaattatcaaataaaaacacggtcactggctagtgatcgtgttttttggcttgtgttcacgccaattcgttagtctgccagtgcccgaattctttcagccactaatgcaggtgaacatcggctatccgttaattattctcctaattgatttactttggacccacatgctcgttattacatgttgtagtaattgtcgatcattttcatcgctaccaaacgccacttagcgctggatccccagtcgttacaggcggaccatttattgaccctaatagcaatcaaatcaagattaccttctgtggtatgctgaacagtcatcaacatctcagttgccagcagttaagtacttaagcgcatactctgcatcttcatcaaccctcaataagataactttaatcacttcatccaatttcggcagtccaactctttgtggcaagtgtcgagaatcaagctggttgaaaatcgacttgagccgcacaatctcagcagccatccgcaatataactcaatcgctagcaaccatctcagtcacgagctgtaaatcatgcgaccgtattgatgcaactggtttgatttaccgattatctgcaattaacgccccattggcaccaatcagtagtccgtcctcaaagcccggaatcattggtatcaaatctcgaagcggttcaaaactgattgattttattttgatgctgtcaaaaaacactcacttaactaaaattagctaagtgagtgtctcgtcaactaatggccacgatgttgagcacgatgttttgccaaccgctttgctcgtatcaactgagcatggtcatgtcgggcacgacgctgctgccgcttcttcattaccaagttacgctgatgttctaacttcaacatttgcattgctctagtcggtttgaatcgaacgtgatgttgacgacattgtcgtgccgcacgacgatactcgcgaaccaattgctgctgagcaaccgcactagccgtcgtccattgcagcgttgaccaccgatcttgaattaacaacctaatctggggttcactaggattctgcgtcccaaaggtcactcgggcgacttgatacccgtccgtcgaccaacgctcaaaaacaccctgataaaattgttgatcaaaaaacaccgttaatttgcatcggttaatcaaattaacccctccttaatttcactaacgaaattcggacaaccaaggaaggcaggttactgacagccgttgctgcgtctggactaccgaccagaccgtgtttttaatttcgctaataattagtatgtcagattaagtcagtttgtcaaattagcacttatgtatcaatggaataattaatgcacttagttaatccgacatgaatcatgattaaaacgtgacagtcaatcagactcctgctcgtcagcttgggctactgagcactgtcaccctgccgctcccatcggtcaaccactcgaatggctgataattatgcctccagttagcgtggtaagaatccaccgaaaattggtgcaaactcaaactgtttccggttgatccaagctggcagttgctgaattttaaaatcaagacgttttaaccatagttattgctaaataataacgagtacaacaagtaataattaagattatattaaatatcgtaatactacactattacactgtgattaatagtatactttgtttgtaaaataccttgaagtggttattattagccgcttaaggtttagggggattccaatatgaacacaccactactgaccgtcacgcaattaaatcaatacttcagtcaccagcacattttaaaagccctgaccttcaccattcaaaaggggcatatcgtcgccttagttggtgcaaatggtgccggcaaaacgacactgatgaaatcaatcttagggctcacttcctttactggtcagatttatttaaatggtcagtcaattacgccatgccatcaccaagctttaagcgctgtgggcgccctaattgaatatcccggactctacccattcttgactggccggcaacaactctcactgttcgcaaccggtgccaatcgtacagcacgcattaccaaaatcattgaagcacttagcatgcaagcatttgccgatatactaacgaaacactactcactcggtatgcggcaaaaattgggtgtagccttggctttgctcaatcagcccgcactagtcatcttagatgaacccatgaatggtcttgatccacaggccacaaaagaattacgcgatttaattttatgggcgcaagctcaaggcaccacctttttaatttcaagtcatctcctgagtgaactgcaacgggtcgccaatgacgtcttagttcttgatcacgggcaactgatcgccaatatgagcatgccagcgtttcttgcccaacagcgccccacttatgaattagtaactaatcaagatcaacgggcttatcagctattgcgttctgctggataccacctagttgcagcaacaccaattcgtgtcttaataacgcccggatttcagcttaatccattactgcaactacttttgaccaatcagattcagttacagcggattcaaccccacactgaagacttagaatcatccttattaaccatgctgaaaacggtcaaccactaaggaggtcaatctaatgttcacattgttacgacaagaaaatcgaaaattaatgcaccatcgtgtgattcaactgtttattccatttataatgatttttcaattcataattgcgatatatgccgctcactacccacagctactaacgccatatgatgcatttgtaaacaacgactacggctttattccgctactatttttggcaatcacaattggcagcacttatttaacgaatgaacggcaaaatggcacgttacgagcgctactttatcgcagttattcgcggacccaagtcttagtcagcaaatggctcacgatactcggtctgatgattggcttatctggctttagcaccctcatgagtctcggactgaagttgagcttctttcggcggttacctaattacggtacaatttggcacacttggggtctgaacatgctatcaacaggactgaccctactatttttaatgagtgtcgtcttactattgggcaccctattcaccagttcaacaccagccattctgaccggcatcattgggtactttattgtgaccattttcaatcaactttgtttttatttatacgccaaagtcagctggttaaagtggaatccgctcaacatgatcaatctaggcgagcaaatccaaacaccacaactacaacaattaacccgactaaatctatccacgctggcgattggttatatcgcctatctactgttattcttaacgcttgccaactattcttttcaaacccgtaacgtttaaaagcatccagccggtcaaataagattactgaccggctggatgctttatcgattaattgttaatttcatcatattagcgtaactgtcgcacaacttgccaaaagtagcgactccagcgcggttgataaatccaagcaatcagaccaattaatgttgctgaccaaactactgctacatatgaccaactcgtctgtggtgccagcataacgtcggtaatcaatttagtcagtatgatgctcaaccctatcagcattggtacccgccaagccggtaacaaaatcgcttggtggtcacgctccgtgatttgctgggcgctcaaataccgaccaagtatcccgcccaagccccagactagacatccaattgcgatacccaacaaccagtgttgattgaggaacgccaacaaataattaccaggttgaccgaatgaccgtatcaatacaaaccaactgattggtttaacgactgcatagccgacgagcattgccattaccaggttaggcgtgaccaataacactaatgcagaagcggtcatcaaaatcagtgcaacgagcgtggtactgattacattgccgccccagacccaccaattgaattgcgcgaaataaattccgggaatattctgtaccagcaccagcagaaccattaatttcgccaaactatacgcaatgatcgtcgttaaactatagctcaaaaacgtcgcaccaaaaatagctgctcggcgaaatcctaagctctgtaaccactcattctgatgccggtaacgtggaatggcaatgagtgctatgcccactaaaatactgattccccatagaaaatcatttggttcaacattactcccaacgcgcaaattcaccaataatccccgccgatcagcatgataaacttgtaaatattgattcaagtactgctgtttcgaaggtgctactaagccatctacatcctgatactgttgccgccggtggtcgtatttaagacctgaaattagcatgtcatgattctgatctagcatttgccagtgttgattcattctgaagccagtccacgcccccagtgctataaacaaaatcagcataccaatgagaagtggcgcatgctgccaaataatcaagtgccccaattttttattcatctcacaacttcccccagttgatggtaacgacggccaacacgatagacgagcagtgccatcatagtcagcacgattccgaccaattcataccacggcgcaattgttcccatcaaaggcagtagtaggatgtccccaagtgttgagccaatactcaaactaatcaaagcactggcgataaccccattaaatagcgattgttgccgcaatgtggtgatatccgctgaccattgacgacaggccacccaagttaatcccagtagcatcagcaagcccactaatgccatgattgccgctaccccgtagtgaacatgtaaccagatactaggcaacgactgaatgtgaaaccaccgcaaccacatatttgtccgcgttaacattcccgacgcccaacgccaggtcagagtgctgatcaggattgctaaccataaccgctgattaaagctccccaccagccaagcaagcataattaggcacccactgaccatcgtcactgccacactacttcccaagagggcggccccgttacggtattgctgataaacttgggggattgcagccgtgatccagccataataaatcacttgacttacaaaaacggtgaccattaatagcagcccgagccgcagctgttgccaccaaatttgccaacgcgtaacacctaaaccagccataaactcgaagcggtgtgtgcgacgaccccataatgcaagcagcaaaccgctgacgagtcccaaaacataatacaaacggttgggttgttgggcccgcactgcctgattgggatccgtagaagtgtattcgccaggccaaaaaaactggtcaagatgttcataataaacatgcaggctaaccgccggacgaccggcaactttatagtctttcgggtgtttaacaaaatccgcagcgttgatccgttcaccacgtacactccgggcatgttccacctgccaagtatgtgtcacattaattgccattaataagctcactaacagacacgttgccgtcacaagtcgcacccaaggccgattttgttgccaccataaccgtctcaattttacagttgccattctacacaccaccccaaacagcttgccggtcgcccaatttaactcggaaaacatctgtaatggtcaacggctggacggccatcatcaatggttgagtttgttggagcgctgtctcaattgtcggcgtgtagtccgcaaagtacacttctaagacccgaccgtaaactttaatcagctgcccatgctctttcacaaccgctggtatatgcttatctgcaaaaacaagctgaaacttgcgggccgttgctcgtaaactttctaggtcgtaatcagcaactaattcatgatgttgcaaaaacagcacttggtcgcataaaccgtcaagttcatcaagattatgtgatgaaatcaagaaactgacgccgtgttcggcgacctcctcaaccatataggctacaatccgctcgcgcacgatgatatccaaaccatcaaacggctcatccaaaataatatatggcacgtgactcgctaacgctagcaagatttgaaataacatctgctgaccctttgataaccgctggtagtagcttttggttgataaatgctcggccactaataacgctgttagttgcgattggtcaaagtcatcgtaagccaacgcgtatgtcgttatgatctgtcgcaaccgttgaccaccaaaaaagtgacgttgtgtatcaatataaaataatttttgccgacagtatggttgctgcaaagtcgactgcccctcaatcactaattcgccttcgtccgccaaatagtgatcagccatcgtccgaaagagcgtcgtctttccaacgccgttccgcccgaccaacccaacgattcgacctggctgccaagtaaaagtaatcccccttaatatttcacgattatcaatccgcttacttaatgctttaacttggatactcatcccgtgactcccccttttgataagccgtggtcacccacgcctgaacttgctgcgcactgattcctaaaaattgtgcttccgttaacagtgattgtaagcgcgtctgaagatcatcaaccgcattcgaatcagttgcaatctgactcgattcactcacaaacgtcccccgaccttttacagtatacacggctcgctgatgctccaagatttgataagccttactgaccgtgttcggattaaggtgtatttctgacgccattgctcgaattgaaggcaattgatcccctggtcgtaagacttcctgaacgatctgctgcttaatctgcataactaactgttcgtaatacggtgccccattagttgcaaacggcattttatcacctcggtattgtgtactacgtgtattactacaattagtacactaacatactaatttgagtttgacaactcaacaatcatattcctggcacaaaatgattacctcaaacgtgagtgcgacatcattacagtatgccaaattactgaaaagagtcttaaatttggttgccagttcatcagtgcttgttcatcctattccgacctccgggaaccctgctcgcatgacagatgaacggccactcaacttagtgcaattggtcgccgaattcaattactgcttggaacattgaacaaacgttaatgtggtctcagttgtttggaatctcagtcataatatggtgactgagaattaatgaacgaatcacagttcgattatcaaactgacagttactgataaaattgctgtctctaaaatagcaacgaccaagccagcaaaagttggggacatccctgtcagccattcgaataccttcccaactggaaggcatttcggccaatgctcagcactgccaaagtgtgtggttcagacggcttgagactgaggattagcccaactaaggtgttaagcggtaaactcatcgcgtcgctacccggaaggctcatcggacccgaacacgtttcgtcaatatggcattaagacgtgggttgcggcttaaatcagtgtccaccacgttttaacatctacataagcaaaaaaaacgcctgaccaatcagcacctttagctggttagtcagacgtcatcatctggtgattattccaagaaatcttttaactgtttactacgtgatgggtggcgtaacttccgtagcgccttggcttcgatttggcggatccgttcacgggtcacaccgaagacttttccaacttcttccagtgtccgggtccgaccatcatcaagtccgaaccgtaagcgtaagacgttttcttcccggtccgtcaaggtatcaaggacaccttccagttgttctttcaacaattcataagccgcggcatccgctggtgaggttgcgtcttggtcttcgatgaagtcacctaagtgtgaatcgtcctcttcaccaattggcgtttccaatgaaacgggttcttgtgcgatcttcaagatttcacgaaccttttccgttggcatgtccatttcagccccaatttcttcaggagttggttcgcgccctaaatcttgtaacagttgccgttgaattcgaattaatttgttaatagtttcgaccatgtgcactggaatccgaatggtccgcgcttggtcggcaattgcccgcgtaattgcttggcgaatccaccaagtcgcgtacgttgagaacttgaatcctttacggtaatcaaacttttcaacggccttcattagccccatgttaccttcttgaatcaaatcaaggaattgcattccccgacccacgtaacgtttggcaatcgaaacgaccaaccgtaagttggcttcggctaattcttgcttggcagattcatcaccttgttcgattcggagtgctaaagcgacttcttcgtcagccgttaacaagtcgacacgaccaatttctttcaaatacatccgcacgggatcattgattttaattccagaagccgagccagcgtcactaagttccttcttagaaacttttttgacacttttgaccgctcgagcatcaggatcacctttttcatcaacaacactaatcccagcatcttcaaccttttgtaataatttatcaatgccactagcatctagtttgtaaggcgctgctaatttatctgataattcatcatattgaatgctaccagttttcttatattccttaattaatgctttaacggctttgtcgtattccgtcgttgcttttgcctttgccatgtagtagcctcctatttagtatgcatctaccagctgatcggttgcaataccgagccaaccttaagtatatcattttcacgcctagttatcagctcgttggacctgctgttgttgccgatataggtcaattaatgccaacgttaactgctgaaccaaatcacgattaccgatctgcttggctgccattaactcggccttcttactgttgatttgttctaccagcggctgttgattcatgatcacgttgactagatcagcaatctcttccttggaagattcattggcaacgtccataaattccaaactcgtgacgacaggctgtaaatctgaatccgtcataaaatccgtaaagttgcccaaatcaaattgattatgcgttttaaaataagcctccgcatacaccaagatttgttgatacgaatcatgaacaaaatgaaaaccagcaatcgccatcactcgtaaccaaacatcgtggtcattcaacaaacggtacagtaacaaccgctccgctttctctacccgacttaacgggccactgttcgtactgccatccaccgtggctgggggtggccctagcggcgcaggtgctggtggcggagctacttgcgtttcatccgagtgaccaccaccacgtcgaacggcctgctgaccgaccagtgatcgtaactgttgctttaaatcatccttatcaagatcaaactccgccactaattggtttaaatataaatcctgttcgacactagaggacagttgtgctaattgttgcaaaaccgcctgtaaataagtcaattgatcgggcgtgttttgcaagttcaaatcatgttttaaatactgcatttcaaatgcagtgggcgtttgcttaccgtcttcaaatacttggacaaacttctcctgcccctgagcacgcaaatactcgtcgggatccatcccatcaggcatttggatcacacccagattaaggcgactgttaccacctagcaatttcagagcacgatcagtcgccttttgccccggcatatcgctatcgtaacagacatataaggtgtcggtaacgcgctcaagcatgtaaatctgctcatcagttaagctcgtccccattgatgcgaccccgttctgaataccagaacgataagccgcaatcacatccataaagccttcaaacagcaccaccgacttttgttgtcgaatggggccccgtgctaagtcaaagttaaataatactgaacgcttgttgaacagcttcgtttccggactattcaaatacttaggttcattaggtgactttttgaggattcgacctgagaaagcaatcacccgaccactcgcgtctttaatcggaaacaagacccggtcaacgaagcgatcacgtaagtcacccgcttgattttcaatgaacagtcccgactgccgtagtagttggtagtcggtctggtgttctttaaaaaaatctaacaagagctgattagcaggtgcatagccgataccaaacgttttaatcgtctcatcatccagcccgcgctcgtgcaagtacttaagcgccggttcacccagttcagtattcactaaaatatgttgatacatcttagcactatccgcgtacaactttaacagatcggcttgttgctgatccttaggtgcggccggttgtgactgcgccgtatagctcgccggcaagtcaatgtgcccaaaatcggccaccttgacgactgcttccggaaaagacaagttttcgagatccataatgaagctgaacacgttgcccccacggccacagctaaaacagtgaaaaatctgcttttgctcattgaccgaaaaggatggcgtgcgctcttcgtgaaagggacacaggccaaataaattcttaccagccttcttcaactgaacgtattttccaataaaatccgcaatgttgactgctgagcggacttgctcaaccttttcctcgggaattcgattggccactttgccaccccatttctactaactaaagtctgacaaaccaaccaaatcattgccgcaatcaaaagccgcatcacgaaatttggatgcgactttgtgcgtgcaaactcttacagaatatatattaccacaagtttgacagcagtgcaataataagttgcccttattagacacatttgtcaaatttgtttgtcagcaagctaaaaaagaagctacagcgcgcttgctgtaacttcttttgattatccacagtccgtgcttatttaacgattaattgattcaagtcacccatcacgttgatcatttgggcgatcgtcaagagttgctttaagtgattatcccgcaccttttcatccttactcatcaccatcgtctgttcaaagtaatcgacgatcaatggtcgtaaggcggccagggctttgaaacggtcctccatgctcatcgctggggtaaattgcttttgcaattcaagaacagcatcgtacaagtgttgttccgcttcattttcaaataaacttggatcaacagtcaaatcaccggctgccagcttagctttcgccgtgatccgcaacagacgagtaaaggcttcaattgtgtccttaaactgcggatcatcttgatgcgcattcagcacatcggctgctttgaacatttcacggatatcctgacgactccctttgataaccgtatcgacgatatcgtagcgaatcttacggttgttaaaccattgtttgacgcgatccgttaagaaatcagcaactggtgccgtttgcttttcgaagtctaagttgtacgtagcatcatgggccactaattccttttgaatatcggcctcgagttgacgaattgggaaatcccaaccttgttcccgtacgatccgtacgattccaaacgcttgacgacgcaaagcaaacggatcattagagccactaggagtcaagccaacggcaaagaagctcgtaatggaatcaactttgtccgcaatagctaacaccgcgccgaccttggacttaggtaagtcgccatcagcgctgattggcatgtaatgctcacgaatagctttaccgactgctggatcttcacccttcaagacagcatacttgtcacccatgaccccttgtaattcagggaattcgccaaccatccctgtcactaaatcaaatttatagatttgcgctgcccggtggagttggttcttttcagtctcagtcaaaccaaaccgatcagccaaaaaatcactgataaccatgacccgctgcatcttctcatacatcgtcccgattttatcatggaagctaacctttttgagtcgttccacatattcttgaatcgagtgttgttgatcttcatgatagaagaaagctgcatcttctaagcgtgccgtcaatactttttgattacctaaagccacgttttccaagtgatccgtgttcccgtttcgaacggaaacaaagtgtggtaataagttatcctcggcatccgttacgtagaagaaccgttgatgatcacgcatcgaagtaatcaagacttcatccgggatcgttaagtatttggtatcaaaatctcccgcaaatgcagttggatattccaccaagttattaacttcttccaacaagtcttcattaactttgatttgccagtcgcgttcattcgccaaggccgcgatctgttcacgaatcgttgccttacgcttagcggcatccgcaataacttgaacactagctaagtcagcttcatagtccgcagcagtagcaatttcaacgtcatggcccaagaaacggtggccccgtgaaacacggccagccgcaacgtccagaatttgaaccggcacaacctcgtcatctaataatgacacgatccaacgaatcggccgaatatacttgaaactgtacgtcgaccacttcatcatcgttgggaaattcatcttggtgatgacatccttgattccgcccgtcaatacttcggccgccgttttaccagccgtaaaggtttgtacaaagacatacggggtacccttaacatctttaaagacgatgtcatcagttgacgccccttggcccttagaaaaaccaatcgctgcctttgtccagttgccatccgcatcctgagcaatcttcttagctggaccccgaacttcttttttcacatcagcctgcttgtcagctaagcctaacacctgaaccgttaaccggcgtggtgttgagaaggttttaacatcttcaaaatcaagccgggcatcctttaagaacttgatcattcgttctttaagttgtaacacactcggtgtaacgacgtgggccggcatttcttccaaaccaatttcaagtaaataagttttcgccattatttcgtctcctcctgtgcgtgttttaataacgggaagccacgtttttcacgttgcgccacgaattccttggcaatcgacttcgccatgtttcggattcgatctaaatagccggcacgttccgtgactgaaaccataccgcgagcatccatcaagttgaaggtatgactacatttaagacagtagtcgtacgcggggtgaactaagccgttcttaatttgccgcttggcttccttttcatattcatcaaataacattaataataattcttcgttgctatcttcaaaagcgtacttagaattttcaaattctggttccaagaagatgtcgccatacttcacgccatcgccccattcaaggtcaaatacggaatttacatcctgaatgtaagatgagagtcgttccaaaccataggtgatttcagaagtgacgggatcaacttcaagaccaccaacttgttggaagtacgtgaattggctgatttccatcccgtcgagccaaacttcccaaccaacaccggcacaacccattgatgggttttcccagttatcttccacgaaacgaatatcgtgttctagcgggttaatgccaagtttttccaaactttgtaagtataaatcctgcacgttttctggtgagggtttcatgaccacttggaattggtggtgttggtacaaccggttggggttctcaccataccgaccatcggcaggccgacgtgaaggttcaacgtacgccgcgttccatggttcgggaccgattgcccgtaagaacgtgtaggggctcatcgttccggcccctttttctgtatcatatgattgcattaacatacaaccttgatccgaccaaaacttttgcaaggttaagataatctcttgcactgataactttttgctcattagtatcctcccaaaattagtgactgaacggctgatggctttgaaacgggggcatcgctattcccagacttatggcacaaaaaaagtcccctgtcgtcgacaataacgacatagggacgattggtttcgcggttccaccctacttctgagtaacctcagcagcttaattacacggtattaaagctccgaaagcgccaattaacaactttgactgaccgtttttcaccatcacggtctcactgtaagtcgaatccgttaaccttctctcatcaacacttaactattcagttcttcatcatcatagctgatggtcgttcgtttgtcaatcctcattcttccggggcgccaacggttggtaccaactgcccatctgatcgatgaagcgtttagatttcaatcgaacgcccactgagttctgatagatttcatccaaaatccggcgtaactccgccgctgtccgcggtttgaccttgatcgaatgaaccttagccaaatccaacacggaaaactgacgtagataaaagattgctgctggactagcatgcaagcggtggggatccaaatgccagtgctgttgacagagcaaaccgccgtaactttcagaataatctaacggtaaatcacttcgaccgcaaaccgtacaccaacgcaactctggggccaccccaaacggttgcagtaactgaatttcgaccacgttagccaccaacgcgggggccacatcttgatcaatcagttgcagcgcactggtcaactgttggtaccaccgccccaccggttgattatctggaaaagcgacgtccattaagttcataacgtacgtggcataagcgttcaaagcaatgtcttgactaatatgttcaagatactgtactgacttgacactattaatatacgagagaccttgatcacgtaaatcaccaacgtattcccccatcgtgaacggcaataactccgccgccattttgaagccacgccgacgcgcaccgcggataaaaaacatcttcttgccatactcggcagttaaaaacttgattagcatatcgcgttcccggtagtcccggcgaaagagcaaaatgccgttaaaattcgtgaccatttgttgggccatccggatcacctagcgattctaatagtcatcttgccgatagccatagctggctagcaagtcttgacggtccttccagttctcttggacttttacccagagctcaaggtagaccttatccccaagtaagtgttcaatatcacgccgagctaacgagccaatcttcttgagcatgctaccacccttaccgatgatgatgcccttttgcgaagaccgttcaataataatcgtggcctgaacgtgaattttttcttcatcttgacgtttgatcgaatcaatcacgaccgccgttgaatggggaacttcttgacgagtcaattcaagaaccttttcacgaatcaattcagaaatgataaaccgctctggatgatccgtaatttggtcggacggataatactgcggtccttccggcaattggcccttcaaggtcgtcagtagttcatcaacgttatttccttcaagcgcggaaattggataaacttccttccacggcaaagcgtctttatactgatccataatctccaagagatgatctggatggacttgatcaattttattaatcactaaataaatcggttgtttaaccgttttaagacgatcgataataaagttatccccggcaccacgccgttcgtccgcattaatcatgaatagtacggcatccacttcacccaaagttgacaaggcggacttgaccataaagtcacctaatcgactatgcggtttgtgaatcccaggggtatcaatgaagaccatctgcgtatccgcagtggtataaatcccctggatacggttccgcgtcgtttgggctttgtcagacataatggcgactttttgcccaacgacccgattcaatagtgttgatttaccgacattgggacgaccaataatcgccacaaagccggaatgaaatgcttgttgttctgccataattaattcctttcaatcttgtccaatcgttaaccaattactagtttaaccaactgacaattaagttccaaattttaggtgcaaacaacactaacccaactaagacggcaaaggccgcggcaaacactaccgcaccagccgcaatgtccttaatttttttagctaggggactgaaattaggcccagtgatcatatcggacaggttttctgcaatcgtattgttaatttcacataagatgaccagaaaaatcgctaatgctagccacagccattcgttaacgctcaagtgaacccaccagccagcaaacaaggccaccgcccccagtacaaggtgtgttcgcatattacgttcttcaatcacaaccgttttaagcccagtccacgcgtgtagccaggactgccaaaacgagtgatttttgccaacctgtagccgatctggtctatttttcgaggccataagcgtccaaaatctggcgttgcaatgtaaacatttcggtttcatccgctggctgaagatgatcatacccatttaaatgtaaaaagccgtgaacgaccaagtaacctagctcgcgcgcctccgaatggttcaaaaaagcggcttgttcgctaaccttatcaactgatatcataatatccccgagatttagtggcatttccgccgccatctccggatccatcacaatcaaatcatcctcgtcatcgtcgtgcatcgcaaaactaataacatcagttggacgatcgacaccccgatactgttcattgattttttgaatagcatcgttattcatcagggtcaccgagacctcggtatcatcccgtaactttaacgtctgaccagcaagatcaattaaatcccgaatcaattgcaactgttctggctgcgctcccgttgttgtttggtcgtataattctaaatccataagtgccccctagcgttgttccacacgatcgtacgccgtaataatcttggcaacgaccggatttctgaccacatcatccgccgtaaacttaacgaacgcgacattgctaatgccgcccaaaatctgttcggcttgaatcaagccactcttagtatggtgtggtagatcaatttgtgagatatcaccattaacaatcatcttggcaccgaaacctagccgcgtcaaaaacatcttcatctgggcattcgtcgtattctgtgcttcatccaagatgacgaacgcatggtcaagcgtccgtccccgcatataagccagcggtgcgatttcgatgataccacgatccattaagcgctgcgtatgttcagcgccataaatatcgtacaacgcatcataaattggccgcaggtacggatcgactttttcctttaaatcaccaggtagaaagccaagactctcaccagcttcaaccgctggccgcgtcaaaatcagcttctcgacatcgccccgttttaaggctgcaattgccatcacaacggcaagataggtcttcccagtcccggctggaccaataccaaacgtaatatcacttttagcaacggcttgcacatactgccgctgaccaaagtttttgacacgaatgggccgtccacgattgtccttaattaaggtctctgaatagaggtctttaaagtaatccaaagtcccccggttgaccatcttaatagcgctaataacatctggcgccccaatctgaataccttgtttaattaaactcgttaaattatctagtactgcttgcgtattatgaacagcaacctcgtcatcactgctgatcgtcatttgatccccaaacacgtgcaattgaacgtgtaacccatcctcaagcaaagctaagtgggcgtcttctggtcctaatagcgcgactgactgggccggatcggcaatgagaaatttttgttcatattttgagttttcggtcaaaaacatggactcctttattgacagatttaatcaccattatttaataatggcacccgcagttagcgtgataaccacgctgatttcagcaggtatttgttagttaatcatagcataaaagcccccatcgaaccagtacaaggacgcctcggcattcgacaacgattttctgaacagcatttttctttcgagcgattaaattggcacgctatcaatcaacgtaagcccagttagatcagtccctgcacccattgctgatacttaatctgaacaaccggtactgcatttctgatcaaccagaagaaacaaaaaaaccggagaaaaatttctccggttaaccgttaattcaataatgatttaactgtttggttgatcagcttgccatccgcctgacctttaagttttggcatcactgcccccatcaccttgccaaagtcacctttaccagtagctccgacttgttgaatggtgtcagcaacaatctgttgaacttcttcgtccgacaattgttttggcatgtactgctcaacaattgcaatttctgctttaacgccgtcgactaaatcttgacgacccgcattttcgaattcacttaatgattcgcgccgttgtttcagttcacgtgagagcacgcttacttcctcatcagccgttaaatcatggccaacattaatttgttcattcatcaatgctgacttaagcatccgtataacgctgagggcttgcttatcgcgtgccttcatcgcagcttttagatcaccattgagtgtatcgattaaactcattggttttccctcctcgttaggtcattagtaatcaatactaattacttgaaacgacgacggttcttacgcttacgtgctgcttcagattttaacttcttcttcacacttggtttttcgtagaattcccgtttgcggtattcttgtaaagtaccactctttgaaacggtacgcttaaagcgacgaagagcatcatcaagagattcgtttttacgaacgactgtttttgccatgttaaattccctccctccgagctcaaaaagtaaccgttaaattatgcatacttacacataacgcaactgttctagtaaattatacataaattgaaaaaggccgtcaaccaaagtttacaatttccttaaaataaatcgttaagagcaacgtcagttcggacagtaaatcgttttcatcccccgccagctatgctacactaagactattatcgaaccgaaatgaggttattctatgtcagcaattaaagtctttattttatctgattccatcggtgaaacagctcataacgtggccttagctgccgctgcacaattctccgactatgacattcgctatcagcgtttcccatttgtccgcaccgactcactgctccagacggttttgtcgcaggcactgaaggaacacgccgccatctttcatacgtttgtcgatcgccggctcagccaaatcgttaaccaattttgcgaagcgcacgagttgccttattatgacgtcattacaccagctttagatactttttcacagattacgcacgtccaaccgtccaatcaccccggtaccgtacacgcgttaaacaccaactacttcgaccggatcaacgcgatcgaatttgcggtcacttacgatgatggtaagaatccgagtggctttttagaggccgacgtggtcttactgggtgtctcccggacctctaagactcccctgtcactctacttagctaatcgtaacctgaaagtcgccaacttgccactagttcctcaggcccaaattcctgacgaaatttggaaagttgatccgaaaaagatttttggcctaactaacgatcctgaaaagttaaacgatattcgccggcagcgaatggtccaatatgggcttaatcccgacaccatgtattccaacacggataaaattaaagccgagttggaatacgccgacaagatcttcaaaaagattgggtgtttagttatcaatgtcgctaataagtcaatcgaagaaaccgccactttaattaccgaaagcttgaatactgacgacactaacaatggctagtatcactaattgccaactcaccgatgccgcctaagttttcctgacaatcagcgcgtgccaccttctaacggtcagcgcgcgcttttttgcatcatttttcttatcattaattaggtcagctactaatcatcagtcgtgtcactcacacgagctcgacaccaccgtcaacgtgcaacacttgcccagtcataaactcattttgcatcaaataaacatacgccgacgcgacttcggcgggcgttgccacgcgtttcaagggattaccagcactgacggtcgcagcctgggccgccaattgtgcgtccgatagttggcgccaaagaccagtcggcgtccaagtcggtgcaactgcattgacgcgatagtcagtcgccaactctacggcaagtccaacgaccatcgtattaatggcttgattgccaacaatcgctccggaggcattatctggccgcccaccagcacccgaagtaaaaatcagcgaaccgtgttggttaagatggtggctggctaattgggccacttgcagatttgcaaaaaatttatcttcaaccgtctgccgaatcgctgcaatcgaattgtccaagaaccccccacccattgcaccacctaacattgagacgacgtggtcaaatgcgggctgagctgcaaaaaaagtttttagttgcgccagattttgtgcgtctaacgccgttccagtcaaatggtctgatgggcctaattgggtgatggcagctgttacgtgcgccgccgtatgaccgataatatggacatcggcgccttcctgtaaggcttggcgagcaattgccatgccgaaacccgaagtaccaccaatcactaatagccgctgttttttcaattgcatcgtcattttcctccttctaaaacaaaaaacgacaaccgactagcgattatcgttcaattctcattaacgttgctgttcaatatcttcaatcaaatgcggattaaactccccggcccgaagcattgcaatctcatacttataaggtggcaattgatgtttcttatcttccccgacatacggcgtttctaaaatcttgctgatgtctggcaattgtggatgatgggcgaccttattcaaagtatcaaagccaatcgttcccataccgatattcgtgtgccggtccttgtgagcaccttgaggattcttagaatcattgagatggatcactttcaaacgatccagcccaatcacatgatcaaattcattcaggacaccgtcgaaatcgtccttaatcgcgtaaccggcatcactagtatggcaagtatcaaaggtaaccgataacttttcattataagtcaccccgtcgatcatctgtgcgagttcttcaaacgtccggccaacttcagttcctttgccagccatcgtttctagcgcgatttgaacgtgctgctctggccgaataaccgcgttcagtcccttgatgatctgcgcaatggcaacatccgctccggcaccaatatgtgctcccggatggagcgttaattgtgttgcgccaacggcatctgcacgctggatctcttgatagagaaagtccgttgcaaactcaaaataacccggctttttcgtattacctaaattaatgatgtatggggcatgtacgacgatctgccggaggtcatgagcctcgattatcggctgtgcttcgtcaattttcagttcgtcaattggtttacgccgtgtattttggggtgcgcccgtatagatcataaatgtgttggcgccgtaacttgccgcctcattggcagatccgagcaacatgtcgggtgccttcatcgaaacatgtgaacctaatctaagcattgtagtcccatccttttcgcaagtttactaattcctgtcataccttaaagttgccggatacatatgataccggcatgatcactcattatccaaataaatctgtcaagttattctaagcggttgtggtcacccgtggataaaagtacgccaaggtccgctcaatcgcatgaccgtcattacgcgtattccataactgattaaactgggttaactgtaacggcgcacccggcattgctaggacatgattcaagtccaccaccgtccggactaatggtcccggcgcccagtccctaaaatcagcttgcaggcccacttcttgctcatagtggtcccagtcaaagacataaaaaacgattttttgacaatttggtaacaacgcgtagtcaaacacaactgaggagtagtcactgaccaaagtattagcgaccgtcaacaattcatcggtactaaactcaggtaccaatgtcactaggtccgggtaacgggcttgcaaatcacgttcctgctcggccaaatggggatgtaacttaataatcaagtgttgatcgggccgcaactttaattgcttaaaatcagccggcaacgcaaattgaacaccggctcgataagtcggcgcatacaaaataacttcctgttgtttaaacgccggatacttctgataaatggccgttgcggtttgcatcacccagtcggacttacaataccgatccgaacgaggatatcccaagacccgcatccgcgtctgtgggacgtgataactcgctgcaaaaatcgttcccatcttctcagaaccaaccacgtaatcagtaatctgatcatacacggtctgaaatcgacgccgatcatctgcgggccgctgtgccgtctgtggatcaccccaaccaaatgttttgaccgcgccagcagcatgccagagttgaatcagtcgttgtggggcctgccgcgtcaagccagcggtaaagccataataattatcaagataaacgtccgctgcccgggtaatgacgggaattcccgtcaaggcaaatcgaactgaatcatgaaacggccgtgtcacaattcccgcctgtgccagttgtgccgccccggtggctgcactcggcaagtaataaacagtcaagcgcccgggaacgcgctggttcaactgctgaataaaatccaaattgtccgcaaagctcatcaaataaatcacctgatcatttttgctaaagtgcgctagccacgatacaactcgcaccagccagacataaattactttcttcacactggccatcctttcatttcatcattaattattggtaaagcgtgccctacgtgacaatcaaaaatgtgccagctcaattacgcttaaaaagttcagattagcgtcaacttacttgagccgtctgccttagtccactaaatataaacaactatttttcaagtctgttccccgttagttgttcattagctctgggtctaactgatatgcacttatgatccagcaataacacaatgcttgtattatataacagatgcccacacttcggctagtcgggtcactattaatagtggtgtaaaagtcgtccccgaacgcctaattaaaaagtgcttgcaaacaagtcccgaaagtcctgtttgcaaacacttttaatctgataaattcatcaaggcttcggttcataaaagtgaccgagaatcttgaccgtatctgaaatgctaacgaaagcgtgcgggtcagattcggccatggccgccttcaactcgcccatttcgtaacgcgtgatgactgtaaataaaatcgttttatcatcatgttgataagcaccttcagcgttgtgcacgatggtaacgccacgacgaatccgattttgaacgctatcaatcaccgttttagggcgactcgtaataatcatcacttgcatcttctgttggcgcgtatacgtcatatccatgacccgaccatttacaaacaacccgagtgcggaataaaaggcatatggccacccgtaaacaaagccagccgcaatgacaatgatcgagttgaacgccatgttgatcgtcccaatactgcgacccgttttacggcgtaacacgataccgataatatcgaggccaccggttgaaatcccatttttgagggccgttccggtcccgaaaccattaacagcacccccaaaaatcgcacaaatgatggggtcatgggtcaaaccaactggggcaatcagtttgatcataatactagatagcgtaacagctaagaacgtatacaacgtaaacttatgcccaatcgatcgccacgcaataataaacattggaacattcaaaataaacagtaacgccgcagttgaaatctgaacgggaagaaacttgctcatcaaactattaatcaattgtgcaagcccagtgattcctgaagaataaatatgccccggcgtccaaaagtagttcatggcaatggaaactaaaatggcgtatataaaagcagttgacgctttcacaacatcacgatggtgtttggataactgctgaaaatcatccatgaattaagtgtgctcctttacgtttttgctttcgttattgtaacacgccgattcgcaaacggccggtcttttgcagtattctgctaaaagtctcacgtttctcagcaaactcccattaatcaatccgactaatttccagaacgagccccgctacgatagttattattagatcacacctatcgcgatgaccagcaactcacgcttagtccactttaggtgcatcggcccactgctcggcgatgaaatcagcgcggccacccgcttcttgttccgcaaataccactggattatttttataaaagcgttggtggcgtgcctcggctggataaaatggtttagcatcctcaatcgccgttacgattggtttactaaatcgttcgctcacctgtaatgcccgtttagacgcttccgcgatccgccgttgttccggaccattcacaaaaatgaccggccgataattatcaccacgatcttgaaattgccccattgcatcggtaggatccgtttgatgccaataaatattgactaattccgtgtaactaatgatatcgggatcaaacgtaattttgacagcttcagtatgacccgtcgtatgcgctttgacgtcttcgtaagtgggatttttcgtgtgtccaccagtataacccgagacaacactgtcgattccgggttgactatcaaaaggctgaaccatgcaccaaaaacatccacccgcaaaaattgctgtttccatgagaattcctccaattaaatattaatataaatttaacactaattaaaaagaacgtccatttctggacgctcttaatatttttattcggttggttcatcatccgttacgggattggtaatattcaaatccaaatcagctaattgctggtcagaaacccgcgatggtgcattggtcattggttctgacgccttggaattcttagggaaggcgatcacttcacgaatgttgtcgttacctgataataacatcgcgaaccggtctaacccgattgctaagccaccatgaggcggaaagcccatgtcaagggcatccagtaagaacccaaattgttcttgggctcgttccttagtgaagtccaatgccttgaacatcttttcttgtaattcgcgggtatgaatccggatcgacccgcccccgagttcataaccattcaagatgatatcatatgattgtgcatgggctttgtgtggatcttcgccatcattcaagtaatgaacatcttcttcattgggcattgtgaatggatggtgagctggtacccagcgctcgatgccttcatcatattcaaacaatggccagtcaacgatccataggtaagcgtattgatcttgatcaatcaagtcaagttccttagcaatcgcggtccgtaagtaacccagcgtgtcagaaactactttgaaactgtcggcagcaaacaataataagtcgcctggtttagcagcagcagcactcgtaatggcttcaaagtcaccatcgttcttgaagaatttcgcaacgggaccactaaagccgtcgtcagtgaccttcatccaagctaagcccttagccccaaaccgtttaacgtactccgtgtacgcatcgatttgctttctagaatattgatcagcaccgccaggaactgcaatcgccttgaccaggccaccattagcgagtgcattatcaaagactttaaagccggcgttagaaacggccgcgcccatgtctttgagttccataccaaagcgcacatccggcttttcagaaccaaaacggtccatagcttcttgccaagtcatccgcgtaaacggcgtcttgatgtcaacacccttgacgtccttcatgacttgcttaatcaagccttcagtataggactgaatttcctcagccgttaagaaggatgtctccatatcaatctgggtaaattcaggctgacggtcaccccgcaaatcttcatcacggaaacagcgtgcaatttgatagtagcgatcaaaaccggcccccatcagcaattgcttaaagagttgtggtgattgtggtaacgcgtaaaaatgcccttgatagacccgcgaaggcactaagtaatcccgggccccttctggcgtcgacttcgttaagaacggcgtttcaatatcatagaacccgttggcatcaaaatagctatgaactgcttgggtgatgccattacgaattttcaatccacgttgcatttctggccgacgcaagtccaagtaacggtacttcaagcgcaattcatctgatacgttaatatcatcttgaatataaaatggcggggttttcgccttatttaagattttggcatcgtgaatctcaacttcaactttaccagtcttcatgcggtcattaacagcgtcagcattccgattaacaacggttccttgcacttcaatgacgtattcgccccgtaactgatctgctaccgccaaagcatccgctgaaaattcctgactaaagactaattgcacaattccttcacggtcccgtaaatcaataaaaatcaaactcccaaggtcgcggcgtttttgtacccaaccttgtaaagtgaccgtttggcctaaataatcctcattgatgagacccgcatatgtggtccgtttcataaacgcttcctccttataaatcggcaaacttgccgttcacactacttatctaaaacttgatgagcatcttgatagatgtccgccatcgcaaccttggtttcctcaccagtagccatagccttcaagttaacgacctgatcagccagctcggtttcgcccaccgtcatcgtgtaacgggcattcaagcgatcagcactcttgaactgagctttaggcttgcgatccaagtaatcccgttcggccttataaccggctgcccgtaatgcctgtaccagcttcaaagtcgtagcactagcagtgtcgccaattcccacaacatagacgtccaacttatcatcagttggtaccgcaatgttttcagcatccatcaacactaatagtcgttcaacacctaggccaaagccaacacccgaaacttcagggccacctaattccttaaccaatccgttgtaacgacccccagcacagatcgtcgtgtagcccttgcctaacgcttttgagtgggtcataatttcaaaaatcgtatggttataataatctaatccccggaccatcgtggcatcaatctcgtacggaattgctaatgcatctaaatacgtcttagtttgatcaaaatgcgcttgagcttccggagacaagtaatctaaaatcgatggtgcatcggccacaaattgttgatcttccggtgccttactatctaaaacccgcaatggattcttgtgtaaccgttccttggagtcatcactcaattcatcaaagtgtggttccaaataatcaatcaaggcttgtcggtaatcatcacgcgtttgttgatcacccaacgtgttgatgaccagtttcaaatcagtcaagccaaaggttttaagtaagttatagcccattgcaattacttcaacgtctagggcagcactttcactaccaaaagcttccacgcctaattggtggaactcacgtaaccgacctgattggggccgttcataacggaacattggtcccatgtaataaaccttgtatggtttgagaacttgcggaccgtacaacttgttttcaacgaacgcccggacgacgccggcagttccttctgggcggagcgtaatgtgccggtcacccttgtcatgaaaatcgtacatttccttcgttacaatatcagaagtatcccccgctgaacgtgagaagacctcgaagttttcaaacatcggtgtccggatctctttgaattgataagtcttgaagacggcacgagccgttgcttcaacgtattgccacttttcactatcgccaggcaaaatgtcggcggtgcctttaggccgttgatatctcattaatagttcctcccttgattgcaatcgacaaaaaaagcgcccttgattatttaccaagggcgctattagcgcggtaccacctttttgagtactaattgataacgtctgtaatcacaggcggaacgctgccgttcacctcaaaagcgtctcctcattgcgcactatccggaattctcagcactaccggtctctggttatagtggcgtacaatgctcttactttctctgcggtcgattgattaatatatggttaaagttacacgaaaatcacttaaaagtcaacgattctagttaaaattatctcaagatttcgtcggtcagctgtttttttggtatactatttgcagcacttcaaattgcaattatcttaaatctagttggtgacagagcatgcaagttttaaaacaattttggcgtcaaatcacagtcacggttatttttatcggcctagtgattggctttgtagtgctattagcgactaataacactgcgactgttaacattgccaacgtcaatattcgtagcggtccaggcatgagttatgcgatcgaggacgctacgtctaagggcaccaaggtccacattatgaaacgcaaaaataattggctatacgtccgttatgcggatcataaattcggctggattgctagttggttagtcaacgaacataacagtcagttgactaaaaccaccaaaatctctgaagccaccatcgttttagatcccggacacggcggttctgattccggggcgctctcgagcaagggcaagatggaaaaaacgtacacgttacgggtcgctaaagctgtagctaaaaagctccggactgctggcgcacacgttgttttaacccgtgattcagatgaatacgtcggcctgagtgcgcgtcccgcaatcgcaaacaagcttcatgcagacgccttcatcagcttccactttgacagctcaccagaaaaaaacacggcttctgggatcacgacctattactatcataagtcaacctcactagcactagccaaggcgttaaacaataacgtctcgaccttgccaattcctagtaaaggaacggacttcggtgactttctggtcattcgtgataattcacgaccatccgtattgatggaactgggttatattaatgataagtcggacttcaagacgatcagttctaaaaagtaccctcaagaagtagcgcacgcggtttacgccggattgagtacctacttcgccaatcaataataatgcagtcagcatgaagtctttgaaagtggccgttattccagtgactgggataacggccacttttcgcgactactcaatcgatgaatcgcatatcaactgacgcggtttacctaaataaccgtctatttgcctgcactttagctccgtaccggacgtctaacctcatttcacactcttacggatcagcgccactaattgttaataacaattaattgcgttacagtgatggtaaccgtatttaacatcgcagcaaggaggagttaacatgcacttaacaaaagcttggctcgcacaactaccactcactgacattcagcaagtgcaaccagtgagcggtggcgacatcaacgcggcctttcaaatcatcacccttcatcaccaatattttttaaaggtccagccgcacaacgacgttactttctttgaccacgaagtcgctggattgcgactacttggtgcagtgactaagacaccgcgtgtcatcgccagtggcacgattgccacggacggctatctcttattagattggctagcgaccgggactggcagtcaatccgcactgggagcggctgtcgccaaagttcatcatcaacaccacgcccaatttggtcttgaccacgacttcacagctggcaagttaccgaaaattaatcattggcagactgattgggcaactttctatacacaacaacgtttagatgtattagtcaatttggctaaggagaaccatttatggtcagaaacgcgtgaaatacattatcaccgcttacgacaacaactgttgcaagattcccacatgcatacggtaaaaccaagcctgttacatggcgatttgtggtcaggtaattacttatttgacacgaccggtacacccgttttgatcgatcccgacgtgttttacggtgaccgagagatggatctggccatgacgacgatttttggtggttttgatgctgatttttatcaggcctaccaagcggcctacccggttgcgcccggtatgcaagaccgcctaccaagctaccaactctattatttactggcccacctgaacctgtttggtgaaacatacggaccagccgttgaccgaatcctcatgcaatattaatacaagcctcgtgaccgaatcctctcaatgagctgtacgggtcgcgaggcttgtatataattttttagctacaatcatcagttatcacaatatttcgagtgtctagactagtcgacaaaggtcaataagtcgtttaaatccgtaacttgaacttccggggcactagtcaccgtaatcaggcggtcaatatcaaataaatatccggtaatcccagcattgtgaccggcatcgatgtccaagttgcgatcacccaccataacggcgcgttgacagtcgacctggtgtttattcaataaataattcaacgcagctggatcaggtttacgtgggaatggctgagcagccgtgaccgcatctgtgaaatattgggctaaacccgctcgttgtaaataggcttgtgcgctttcgtcacgatgggtcatcaaataattgtgaccaccaactgcgataactttttcaagcaccgcttgagcacccgcaaaggcggccggtgcatgctgtaattgtggctcccaacgttgatagcccgcccgtaaatcatgccaatcccaaccatactgagccgcaaccattctttccgcataaccaactgactgttgccgcatcagctggtacgttgtatcagccggaatagtcccacctaactcggcaactgctttttggaaagcttggaccatggctggataagtatctaacaaggttccatcgaggtcccataaaaactcacgcatctcattcactcccgctaataattgtaatagccaaaaagctgaaagtaccggattggtctttcagcttttacttcaacgttgatcagtatcataacaaatcgtgaccggcccatcgttaaccaaggaaacttgcatatcggcaccaaattcaccagtcgcaacggtcacgccactggcagctaattgctgattaaatgtatcatacaatttgctagccaattcaggattacccgccgctgtaaaacttggtcgattaccatggcgcgtctccgcgtataacgtaaactgcgatatcgacaagattgctccaccgacttgttgaatattcaaattcatttttccatctgcgtcactaaaaacgcggaggtttaaaatcttatgcgcgatgtaatccaattcggcttgaccatcgccatcttgaaaaccaaccaataggacgaaaccgtggtcaatcgtgccccgaactttcccatcaatactaacttgtgcctgctgtgaccgctgaacaatgactcgcatagaagcctcctaaaacattttccgttcgacaacgtaaaggtcctgaacatttttcagactgtcaatgattcgttggagatgttccaagttgcgaacccccaacgaaacactaataatgaccatcttgttgtgatcgaccttaccgttgacattggtcaaaaatttcgtgtgattattgataactttcaacacatcgttgagcatgccattacggttataaccttgaatttccaaatcagaattgtagttcgttcggtcaccctcgggattctcccactgaacatcaatcaaccgttcaccatttgcttctgcgctcttaacgttcggacaatcaacacggtgaaccgaaacaccgcgccccttcgtaatataaccaacaatctcatcacccggaattggagaacagcaatgacttagacgtacgagtaagttgtcgacgccttgaataatcaccccaccagaagatgagaccttttgccgcttccaatcctgcttctcctgatcctcattatgatgatctttcgatttcttcttcgctggcgcttccgtagagtctgccaaaatggcctcctcacgttcacgctgccgattagcctcgcgctgtttacgaacatcactcgttaaccggttagcaatccctaccggttggacgtcaccaaaccccaaggccgcgaacaaatcatcctcactaccgtagtgcatcttttgagcgaccgccgtcaccttgtccttagtcatgatttcttttggattaaactctaaatcacgtagctgcttctcaagcaaatcacgacccgtaatgatgttttcctcacggtcagcattgcggaagaactgtttgattttattacgggcccgccgcgtatagactaatttctgccaatcacggctaggaccagttgaactagtggacgttaaaatatccacgatatcaccatttttgatttggtaatccaatggaacgatcttgccattgactttcgcaccagtcgtatggttacccacttccgtatggatcgaatatgccatatccagtggtccagcgccctttggtaattctgtcacgtcacccttgggcgtaaaagcatagacccggtcactaaagaggtcgcccttgacgccctccataaagtcggcagcgtccttactttcatcctgtagctcaatgatttctttgactaagttcaacttgttgcccgactgagtctcttggacctcgtcgcgtttaccttccttatacgcccagtgtgctgcgaccccgtattcagcgacccggtgcatttcaaacgtccggatctgtatttcgaggggcttaccttcaggaccgaccaccgtggtatgcaaagattgatacatattggccttgggcatcgcaatataatctttaaaacgccccggcatgggcttccattgtgtgtgaatcgcacctaaaactgcataacagtccttgattgaatccacgactacccgaattgccagcagatcgtaaagttggctaaactgtttgtgtttgtcccgcatcttcttataaattgaatagatatgcttcggacgaccataaatttcagcttctggtagttccagatcatggagcgccttttgaatgtcttgaatggcaatctcgatgtacttttcacggtcctcacgccgcgaattcatcaagtggacaatgcgataatactgttgaggattcaaataacgtagtgaaatatcttctagttcccatttaatcgtgctgatccctaatcgatcggcaatgggggcgtaaatttccaacgtttcatttgcaattcgccgctgtttatcgggccgcagatgctgcaatgtccgcatattatgcaagcgatcagctaatttgacaatcatgactcgaatatctttagacatcgccaacagtaatttacggtgattttcagcaagctgttctttgttggacttgtaccgaatcttacccagcttggtgaccccgtcaacaataacggccacgtcatgaccaaacagttcttcaacgtctcctaaagtaacaccagtatcttccacaacgtcgtgtaagaaacccgaagcgacggtttcagggtccatcttcaattcagctaagataccagcaacttgaatcggatgcataatatacggctcaccagattggcgatactgatccttatgcacataagttgcaaaatcacacgcccgtttaactaacgcgacgtgatcactattcatatacttttgaaccatgtccaggacatcctgggcagtccaggtaggttgtttgggcattttatcaccacgacttccacaaagattctatttaataaaaggcacgtgaggttcccacccaacgtgccttgacaaccgttttaacgcaaactcgcgcggggaccagttaacccatatgctaagtaggatatgcctaaatcaactaacgctaagtaatagacatacgttgggaaaaatagatagagcccgacaaaacagcccactgggaatagccagactaaccagcccgtccgttcagtccgacgaatccaccagccaacgactgctgccagcacaaagtcaactacaaagagtagccatacaatctgatgaaaccggctaatactcgtaaatcgtagcaaccatggtatcatcaccccaacgacaagcgcaatcagccaatactggccattaaacttacgaattttttccgtcaaactaactccctcgcttacgctttattgctaaatgactatgattatttattgtacaccaccgaccgcaaaattacactagttcgcaccaaaaagaaacgctacttagtaagtagaggggtgccgtttcggcccgcatgattcgtggacccaggcccactgccgcgataccagcagtttgtaatgtcgccacttcttgtggtgccaagcccccttcaggaccaaaaatcgccagcagtcgttgtggtgcggtcatcgtttttaacgtctgcaccagttggctgctctcaccttgtttggctgattcctcccacgctacgaccccggtatcatatgacacgtgtgctaacaactggtttaaatccgttgcgtagctcacactaggaatcatcgtccggtgtgactgttcagccgcgccctgcgcaattttcgccaagcgggccaacttgcgggcccgcttattcgctgcccatttagccactgcccactgactatcgaaaaacacgaaggcgctcgcacctaattcagtaccacgttgtacgatctgttcgggtttatcgcctttagacaacccacaagcaatagtcactggcaacggcaattcaacatggggcgtcgtaacggccgtgattgtcgctgtagctgttcgaccatcgcttttcaccaaatccgccagcacgacttgatgtgtcgtcgtaacaaattccgcagtgtcccccggttgtgcgcgcatcaccttgacccagtgtttgaccgtctcacccgtgatagtgaacgtttgcccaatcgttgtcgtaatcggtgttgataaaaagtatcgttgcatttcagtcccccactaatcttcagctgttggtagataagccacaataccgtgccagtcacccatttgcgtatgttgtgtaatttggaagcccgcttccttaattgtcgtcatgacgacctggaacttatcatcgatgatgccagaggtaatgaaatagccgccccgttttaagttttgacgggcttgtggtaccaacggaataataatttcagccaaaatgttggcaacgataatatcagcctgcgtgtcaatcccagctagtaaatcattggcagccacgtgaacatctttggcaactggattcaagtccaaattcgtttgagctgatgccacagcgacatcgtcaagatcgtaagcttctactgcaccgacgcccatcgctttggccgcaatactcaataccccggacccagtacccacatcgatcaagtgttcaccaccattgatcacagtttcaagcgcctgcaaacagagcttggttgtcggatgcgttccggtaccaaaagcctgaccaggatctagtcgcaacacaagctcacctgattgcactggttggtactgttcccaacttggcacaatcgtcaaatagcgcgtaacccggacggggtgatagtattttttccaggccgtcgcccagtcttcatccgataaagccgtcatactgacttcattaggtgctggattcaacccaaaatcagtcagctgactaacccgctgcttgatcgttggaatgacttccggtacaaacaccgtctcaggataataagcagaaatcttcgccccactggtaacgtgtggaatcgtcgccaaatcgatgatctcaccataccgatcaggctttaaattctgataatccaaggcatcatcaattttgacgccactggccccggcttccattaaaatgtttgccaccgcttcgacagcttcattagaagtactgaccgttacttcagtccatttcatatctttatattttcctcccatcgaaagctagagcgccaagcgccatcgcttaagactatcacgtttttcttagtaacaattatataacaagcctgattaacttgacaatcacctggtcatccaaccatgatgttcatgatcgatagtccggcgagaaatcttggatacgaatggattgccggccacaaagtaccgcaatggtgccgttgtccattcacccttgttgacaattccaattcgcggagtcgccataacttgttccggttggcgataatgactcaaatccaatgataaggtcgccggttgcagcgtttgtccatttaacgttttatctaacccaagcgcctgcattagcttgcccggtccgttggtcaagttcgcaatgggcactggccgctgctgttgcattcgttcaagccccacatctggttcaattccgcgaatcaagacacattctggcgtaccggcagcttgtgtcacaatattcagtaagcaccaggccctcatttgataaatataaatcgttcccgctgattgccagagtgcgcgattgcgcggcgtttggtggttctggtacgcgtgagctcctgcatcacgggcgccaagatacgcttctgtttctgtgatccaggcggtcaatacaccgctagatgtctgtaggtgcaactgtttacccagtaggctcgccgcaatttcaggtgtcgtacgtgtgcttaaaaatcgttcgattgctgtcataacttgttttactcgcccctaatagaaaacggactagccaccttgctagtccgtcctcatgttcatttaatcattatttgcggtctttttggttagatgcttattcaaatacttaatcatgtcggcttcatgcttaaagatccgcgggtgcttttgcttgtgcaaccgaaccgcgatctcattgattttgattcgcccggtccaagtatgactgtacttaacgaccacccgattgttgcgatggtccttaccgaatttcaacacgtaaacgctgtcgggcaccatcagcggtctaatatatgttttatcgtagtcataatgtattgatcgcagaaactgtttcgtgcgttttaacatgtcgttgatctctccttcacaatgtgaaattgattaaataataaattaatttatcgttagtatattttcatatctagctattattatagcagactttaaacaagtagtgtaccaatttgccattggtttagcaagtatcgaactttaattcttataaatttgctaaccatttcagaattgtttttgccgcatatccgggtatggtaaaatatgattaaattagtaaggttatcaatattagggggaatttactgatgatactcatcgaaagaatttatcgtcgtggtcatgaacagttgacaacggtcgaccaaatcgaaaaatttcaaaccaatgacggttatgtcacatccaacgaagtcctcgcccgcgaaatcggtgcggatagtgaaaactgcttctacaaaaatcaagagggcaaacgcaaaaaagtcgttgcgaccaaggacgatcagggcacttggcatttaaagaccatcggcacaactgacccgactagcgatggcttattgcaactaccgcatatggatgatgtttggggttaattggtgcttcgtttagaagaactgataattagtgttcgtcagttagaactaccatcaaagactcaggtttctgatggtagtttttttatatacatatcgtacggtatacaagcaacgtaattaatagcaattagtatttttattgaattctaatctatcaatgatacttgcattgatataatctaataagcatgctcttttttattgttggcacagtctgacttcaatgtctttggagccaacactcataacaagctagaagtcattaaaagtcaacttgaaaaacaccttatttggaggagtcttatatgaaaaaagtagtcactggggctgccattgttgcgtcattatttatattaagcggttgtggtaatagttcaaaaacatctactcaatcaagctcacatcacaaagaaactgcgaccaatgtcaaaaaggaaaaaactattacggttaatcattcgagcattgtcacttctgacaatagcaagttctcagttcaaggaagaacggaagaaaatatcggtgtttatcttctcgataagagtggtcaagttaaggatacggttacaagtgattctaaaggcctatttcattttaatgaagacaacgatgatgcaaagactgtcccatattaccttacaatcgatgatattgacgcagatactgatcctatttccaacgaacctaataaaaataacgttaacaagcttaaggtttataaaaaaataattgttaaaccttcttctgaggccgttaattcttataaatcttcatctagttcggctatggattctatggttgctgccaattcttcatttgacgaatcggtatccaaaaataattctagtgatagttcgtcgtctgctgctaaatctactactcgtagtatccattatgataaagttgacttagaaacatttgcaactgaaactgataaatacatcggtaaaaacgtcgaaactagtggagaagttgcctacattcaaaagaatccagataatacagatatctattatgttgttatcctccctaaagatgaccatgcatcttcaggctactcatacgggactgttacagagatcaatgtggatacctttgatgaaactaacattaatgaaggcgataatattactgtaaaaggtggcgcactcacatctaccataaaattaaatggtaagaccttaaaatctgatattgttgttgattcagtatctgtaaattagaaaattggcccccaacacgggcttttatttaaaagtaaaaaagaacatacgtttggacattaggaggatattatcatgattattcaaaaaattaccggaaaagaacaaaaacaattggagctgcaggacaagttttatcccggaccaggacgctcaaaaactaccggctacatcgtcgatgataaatggtccgtgtacatcacctacgtaccatttacaggctatcacgtttctattggggatcatcgctatggacttgtccgacccaactatatcaccgttgacgctattgcacggttggacctattcccctatcgcaagaactacatgctttattctgctggtagtgaagttgttcattttgacattaaagactgaaaggaagtataaaaatgcgaggatcaattagaagacgtggcaaccgctggtattatgcatatgaaggccccaccatagacggtaaacggcagcgaatcgagcacgttggtggtcggacccgtgaagaagcagaacgggccctgcgcaaagcaattgatgagtttgagcgcggcggtgttgtcatcaagttgacagagatgagtgtagcagactacttcgattattggcacgagaattttgttgtaaagactcttaaatataacacgcaaacgaattatcgtaatattatcaacaattacattaagcccgatatcggcatgtaccgaatgaaatcaattggtccagcatcaattcaaaagttcgtaaatgacctacccacagacaagctctcaaagcacactattgagatcattgtttcagtcttacgtaagggctttaagatggccgtcttcccttaccaattaatcaaagaaaatccagcaaactacattgtaaagcccactaataataatgatgatgaaataacccagcaagctgctcgagataagctcaaaatcatcaatatgggccagttcaagcagatactagcacttgttcctgaatctaaccccttgtatctcccacttattatcagcttcaacactggcttgcgccgtggtgaggtttcaggactcacatgggacaacatcgattttgataacaaaaccttgaccgtgaacaagcaaatgattatgaagaaaaaagaatttgacgttacgtcacccaaaactaaggcaagctatcgtacaattgcagtcggaaattcactgctaactgttttaaagcgtttcagaacttaccagaaggaaaataaagtgcgttacggacaattttactttgatagcccatttgtttgtaccaaacaaaatggtaagccgattacccctagcgtaattaaatactacacaactaaactatcacaggaattagactttccatttaattttcactcattacggcacacacacgcaacgatgctgctagaaaatggagccaagtacaaagaaatacagcaacgccttggtcactcacgtatttcaacaacgctagatatctattcccacgtaaccaataagatgaaacgtgatactgttgatatcttcgaaaatatgttaaaaaacaacagttaaaaagatgatagacactttttcgatatatgtatattttgccaacatcacagtttcaatgttggcaaaatgttggcaaaacggaaaaataaaagagctccgcttacgcggaaccctatcagttcggcttttcgtcttcgtcggttttcagaacagccatgaacgcttcttgcgggatttcgactttaccgacagccttcatacgcttcttaccagctttttgcttttcaagtagcttcatccgccgcgtccggtcaccaccgtacagatgggccgtcacgtccttacggtaagctttaatattcgtccgagcaatgactttagaaccaatcgttgcctgtaccggaatttcaaagttttgccgggggataatcgtcttgagcttggcggcaatctcgcgtccacgcgcaggtgcaaagtcgcgatgtgcgataaaactcagagcatcaacttggtcaccgtttaataagatatcgatcttaacgaggtcactggcacggtagccgtctaaatcataatctaacgaggcatagccgcgcgtgttcgactttaatttatcaaagaagtcaaaaatgatttcggacaacggaatgtgataaaccacgttgacccgattactatccaagtactccatcgtatcaaactcgccccgtttacgctgggctaattccatgaccgcaccaacgtaatcattaggcaccataatctgagctttcacatacggttcacgaatttccttgattgcagacgcctcaggcatttcagccgggttttccacctttttctccgtgccatcagtcatccgcacatgatacgttacggacggcgccgtggtaattagttcaagattaaattcccgttcgaggcgctcctgaatgacgtccatgtgtagcagtcccaggaatccacaccggaacccaaagcccagtgcttgtgatgattccgcttcaaattccaatgcggcatcgttcaattttaatttttccaacgcttcccgtaaatcggtgaatttggcattatcagtcggataaatcccagcgtagaccatcggattcatttcacggtaacccgccaatggcttttcggccggatttttcgcgttcgtgaccgtatcacctactcgggtatcctgaatatccttgatgctagccgtaatgtaaccaacatcccccgccatcaaataatcccgtgctaacggtttcggtgaattaacgccgacttccgtcacttcatattcactaccactgttcatcaaccggatccgatctcctggacgaacgatgccttcatgaatccgaacactcagcaccacgccccgataatcatcatagacggaatcaaacactagggccttgagtggcgcatcaagatccccctgaggagccggaatcttatgcacgatttgctcgagcagatcttcgataccaataccggctttcgctgaagctagaacagcatcttccgcatcaatcccaatgtcatcttcaatttctttgcgcaccttttcaggttcagccgatggcaagtcaatcttgttgatcaccgggacaatttccaagtcatcatcaatggctaaatacacgttggctagcgtctgggcttcgaccccttgcgccgcatccacgactaaaaccgccccttcacaggctgcgaggctccgtgagacttcatacgtgaagtcaacatgtccaggtgtatcgatcaagtggaagatataagtctccccatcctttgcttgatagtgtaactctaccgcattcaatttgatcgtaatcccacgttcacgttccaagtccattgagtccaacacttggtcttgcatctcacgtttggaaatcgtatcagttagttccagaatacgatccgccaacgtcgatttgccgtgatcaatatgggcgacgattgaaaaattccgaatatgttgttgtcggtcttgcattgtcgctttatccattgattttcctactttcttcctaaatcctaatccctacaattataccaagttagtggcacaagcacaatttttctatcagaccgctccagacaccccgctgcgccactgaataaatgacgtaacaaaaaagtacaagccaatatggcctgtactttttagtaggttattcaaaatccttgatttcactgggtttgagtaattgccattcttttgaatagaagtcgtcattaatctgataatgaaccggcttcgtcttcttagtcaagaatggatcaaccttttgatccacggctaaccaaccacgccagccaagatgaatcgtatcagtcatgaagtagtccttaccaccgtcctgggtcaggtccaagacgttattaaacccttgactcttcaactggtactgaatcttcttgtcaaactgagcaatcatcttcattgacagtccggtataagcagaccagcgctgattgattggtggaatgatgaacaagacatcggtgtgtgtctttgcaaactgattcaaaaccagttgaaaatcggcaaattctggtgacttcgtgtaattcaagtgtcgctgtgaatctttgagtcgcttgtaattacgttttaacttcgtgttccaaaattgattgctgatttcaagactgttcgagtccgtttgcgccgcaccgattttaccggctaattggtttaactgattaaagttatatgtcgctggtaacttgttagcttgcgcattgacagtccgtaaatttttgcccgcaattccaaaacgtgagaagaactcatcctcactgccaaggacacgtgccttatagttaatatacgtcatttgtgcgctcgttggtttaaacccagctgccacacgtgccagggcgccttccaaaatgcgatcagaagaacccgatggcatctgtaacaaacgttgagcggcataccggtccattgccgtattctgctcatcctgtaaccaatcaatggtctgcagtggtgagtaatagtacgaaaacgcatctttccgcgttccttgtggcacaaaccattgtggcgaaattacaaagacggccttcttatttgtaatctgctttttcaccgattgcatcgcgaaatactgcgtcaacgactgggtcccccgcgcaccgagtagaaatggtcggtaattgcggtgatattttgttgccagtacggacggatgcattggatcaaatcgtgaccattctgaagaaccaaagaacgggacatagccatcatccagcgcctgtcgtttaactaaccgaccttttaatacgttggctgacaaggaaacggccgcttttttctcagtatccttagaaatatggtttaatccaaatgagaacggtgaaagcagtacggccaataataagacggctgccaaaataattggcccaaaaatcttaaaaaggcgtttggcaacgttcattgcaagttctcaacctttgcaacaatcttagccggtgtatcccattctgaccgttgaaattcagagaccggcacttcgattcctaattgattttgaagttccaataaaagttggacggaacccattgaatctaagattccttcatcaaacaggttaacgtccatgttactggaaacatcttcccccgttaagtctgctaaaattgataaaaccgttgcttttgtatcatccattgtcattacgctcccttattgtaattatattatggccgggctccaaagaataacgtgttcaagaatcctgagaagatcaagaaactgaaacaaacgacgttaaacgttaggaaaatcgcaaagtattccgtaaatttattagacggcaactgcgcttgatgtttcttcttgtaccgtaaccaagcatcgttgacaaccattgctaaaccatggaatagcccataaacgatgtaataccatgtttccccgtgccaaaaccccatgatcaacatattaataacgtatgccacgttggccgttgtgatccggctcttaaagaccttgtgtttcatcataaagaataccaaccgcatgtagatgaaatcacggaaccagaaggacaacgtcatgtgccaacgattccagaagtctttgatgttctttgacttaaacggttgattgaagttcatcggagtttcaacacccatcaggtaactgataccgacggcaaacaaactgtaacccgcaaaatcaaagaataaatccatactatagacgtacatcacaccgactaacgcccatgacatgccgtgagcttgcaaggccgcgtgttcaacgacaggtagcatccgcgtaccaaagatataagccaaaatgaacttatataagaatcccaagaaaatgtagcggacccctttttcaactaacccgagatacttttcacgggtcgggacactatcgtaatccttaacgaaccgccgataccggtcaatcggcccagacgagatcgttgggaaaaacagcaagaactggccaaacagtaccggatggaattctttaatcaccccatcacgggtctccatgatcatctggaccactttgaaagtcaggtaggaaattcctaagaaaccaataattgaattagcaccatgtgccacggctggtgtgatcttaacgacagctagtggaataatcgctaaaatcacactgacaacgaaaacccagcccttattaggtgaatctggtcgttgtcgatactttgagtacaaccaaactagtgtgatctgatagaccaaatagataattaacgcgatcccagtgcgccacttaacaccgccaaaggtcagcattaagaagataaacgatatcaatgattcataccaatgggatcgccgaccatataacagaccaatcattaacggtaacaacgcgataaagagcagcacaaagtacgttgggttaccatatgggtcaaaagaaatcattctgggttaacctctttaatgatcgacttgacatcaatcttaccgttaggcgttaatggcaagctcgtttgatagacgaaccgttgtggaatcatgtattccatcatcattccttgtaggtcctttttaattgcagtggtcaaagcaaagtcactttcgaagtcattcggctttggtaccacgtacgcaatcatttgcgttactttgtgctctttatcgtattttggaacggcaacggcttgtttaatatgctgttgctgtgctaagaagtgatccacttcttctagttcgatgcggtaaccatgcattttaatttgaaaatcaacgcggccacgataacggaacagaccgtccgcatccatcgtgccaatatcaccagaatgataggcgggttgcccgtctaattcaaagaaagccttggcagttttttcagagttgttcaaataccccttcgaaacggatggtccggcgataatcagttcaccttccgtgccatttggaaccgcctcaccattttcatcaaccacaagtatccgcgtatcagctttggcataaccaattggtagccgatcatactgcgctaatgcggcatccgtaatttcaatttgagttaccgcgacgcaggtttcagttggcccgtacgtattgaagatccgggcatctgggaaccgtttcttgagtgtcgccgccgtcttatgtgtgagttcctcaccacagaacaagaagtgcgtcaaagttggcaagttttcagcattaaactttggttctagcaaacaaatgtccataaatgatggtgttgagacccaaacgttgattggtaacgtcggcaacgcagcaaataattgtttgaaatcatctgtcacggccttcggtaatgcgtatagtgtcccacctaacgctaaggttgggtaaacgtccatcacggataggtcaaatgaatatggtggttgcgacagcgagttcggctggtcaggcaatccgaagtcatcactcaacatccagtcaacgtaactgaccaagttatcatgactaatttggaccccctttggcatcccagtggtaccagaagtaaagataatatagtaattatcatcgccactaacgacatgatccgcttgataatcaacgggagtcgcaaagatagccgccaattgatctggtgtaatcacgggggttgtcccgacaccggttggcaaatcagcaacagcaataacggcagctggcttagcaatctcattaatcattgttaaccgctcatttggtgaatgtgtatcgattggaatatacgcccgacctgacttaacaactcctaagaaagtcgcaatcatttcaaacgtctgaccaccaaacacaataattggatccttggctggtaaatcgagcgtgtcaagatgcgccgccaaggcatctgaataagcttttaattccgcataagtgtgcgttacaccttgcacatcataaaccacgttattgggttgcgtccgtgcataatcatcaatcgttgtaatgatgttcttaatcataattaaaactccccccaaacaatagtgttactgcatccatttttaaaattcgttgtaaataaacttcgcttggttgatcccactataaccgtaaagataaaccaaggcgagcatgacagcaaagtaaaatactgtaagtgcaatgaattgaacgaccggacgttgaaaccagcttttcaactttgcaaacatgccatcacctcctccactaacccaatgtcagttacttaatatcacccttcattaattccgtaaaaatcttgttggctgttgcttgaataccagcagctttgcgatagtagttactcattaatacaacaccagtcttcccatccggtgagaggaagatgctggattcatagccataaccaagtccgtgtgaccgaataccattactcatgttataaacaccaccgccatattcacctgtggctgtgcgcgtgtgcaaaattgcaacgttcttttttgacagcaactgccctttaagaatggcactttcaacggtaaataaatccgcggtactcatataaacttgcccagtacctaactcattggccatttgtgatttgctttctggcattgtttgatcataattcggaagtgtttggtctgcaagcgctcggtaaccagttgtcgcatcttgaccttgaccatgaatcaaaaagcccgtttcattcagattcaacttgtcaataaaatgtgttgtaaagaagtgctgatatgattgaccagttaccttgcgaataatgccagctagcaacagaaaattaacggatgaataattataaattccatttttatctgggtagtaaaaaacattgtgagccgcaaaatcaattacttgattttctggtaagaattcttttgaaccgctcttcaaacggaaccctgttgtcatatctaacatttggcgaagcgttgtctgacgcccatgctttaaagttggataatacttcgaaatcggatcagtcagcttaactttccccgcctgcaccaactgcataatgccaaccgccgtcattgacttttgaatcgataaaatttgatactttgaattgactttattacgttgatttttagccttgtttgcgtaaccaaaggcacgattataaatgacatggtcattcttaacaactaatgctgaccccacaaaatggcttaggtttaaagccttagtcacttgctcatccgtgttcttattattcgaaaacgttgtctggttaatcttacgactaagctggctattttttaatgccgctttcttattcaatgctttgtcagtttgacgctttttagcaatcgctgcttgccgctctgtatgataaacatagtagccgccaccagcacccacaatcagcagtccaagcaaaactgttactaaaagtttgctttgcttcacaatgattgacctccccattagctatcaattacgaaccgattggtgatattagctacgccgccaataggacgtaagttcaagttatagtgtaacaacctaccgaccaataacggttaggccggctcaaaaagatcaaaatcctgcattttcgttcgctgatacgacatatttgtaacggttttgtaacatcaacgttacgtcccccgtaagctagcagcgtattacttcacccccttgactaattctagcactcactaatccccggacgacaggataacgaaacagtttgcacaaaaaccgtgttactgaaaggtcacttaataaacaggccggagtgcttgattgacactaaaaaaagctgaacaatcctcatcacatttttgtgatgggcatcgcccagctttttgtatatttctggaattagttcgctcggttaaacaccccgaagcttgtcaaataacgaactcttgccattgccagcaactgatttgccgctagctttagcaaaggtcttcaaagcttctttttgacccttgttcaagtgcgttggcgtttcaatattaacggtaacgcgttcatcgccgttgccattgccacgtaatcgtggtgcacctttaccacgtaaccggaaagttgtccccgtctgagtaccagctgggatcttcaacttaacgtccccgtgaaccgttttaacttgaacttcatcaccaagagcggcctgaacgaagtcgatcggcaacttgaagtaaatcgtcgcgccatcccgttcaaagtccttacttggctcaactctgaagataatgaataaatcaccataagggccaccattcgttcccgcttcaccttgattttgaagccgcatttgttggccttcttcaactccagcaggaaccgtcactttgatggaatgactttgttcagtatgaccagagccaccacaagtggcacacttgtccttgatttctttaccagttccatgacaaacgtcacaaacttgttggctcatcattcgaccgagtggcgtattagtctgtacctgaatatagccagcaccatgacatttcgaacaggtcactggtgacgttcctggcttggcaccagagccaccacaagtctcacactgttcctcacgattgtaggtgatggtcgtcttcttaccaaagatcgcatcttcaaacttcagtgtcatctcatactgtaagtctcggccttgttgcggggccgttgggttagaacgccgtgaaccaccagcgccaccaccgaagaaggaactgaaaatatcttcaaagccgccaccgccgccgaagtcaccaaagtcttgaccgccgaaaccgccggcgccaccgaagccttgttggccaccagtcgatccgaattgatcatactgtgcccgcttctgggcatcgcctaacgtttcgtacgcttcattgacagctttaaacttttcttccgcgccaggttcatgattcaaatcaggatgatacttcttcgaaagcttgcggtacgccttcttgatttcgtcctgactggcatccttttcaacacccagaaccttatataagtcttgctctgccattgtaacctcctaatgaaccttaattaagtctcattaatactagcatatttaaagcaaaaaggccaaagccacgtggccttggcctttttgttctgccggtgctacttcttatccttgtctttatccaagtcttcgaaatcaccgtcaaccgtgttgtcatcactgcccttggctgagtcggcattgccagcagcattactgtcggcaccgccttgtgcaccctgagcttcttgagcttgttgatacaacttaactgataagtcctgaacgatcttgttcaaatcgtccttcttggccttcatttcgtcaatgttgttatcatcttgagctttcttcaaagcatcacgagcatctttggctttcttaacttcatcttctgaaaccttgccttcaagatctttcaaagtcttgtcggtagtaaagatcaattggtcaacttcgttcttcaagtcaacttcttctttacgtttcttatcggcttcttcgttttccttggcttccttgaccatttgatcaatttcgtcgtcagaaagacccgatgaactcttgatggtaatcttttgttctttattagttcccatatccttagcagatacgttaacgatcccgttcttatcgatgtcaaacttaacttcgatttgaggaacaccacgaggtgcagccggaatatccgttaattggaagcgacctaacgtcttgttatccgctgccattggccgttcaccttggagcacgtgaatgtcaacagctggttggttatcagccgccgtactaaatacttgcgacttgctggttggaatcgtcgtgttacggtcaatcaacttagtgaagaccccacccatggtttcaataccaagtgaaagtggcgtaacatcgagcaaaacaacgtctttaacatcaccagtgatcacaccaccttgaacagcggcccctaaagcaaccgcttcgtcagggttgatagaatggttagattctttgccagtccacttttcaacagcttcttgaacagctggaatccgagttgacccaccattcaagatgacaacgtctaagtcactagccgataaatcagcatccttcaaggcattttcaacaggaatgcgcgtcttttcaactaggtcagcagttaattcattgaacttagcacgtgttaacgtggtttccaagtgcaatgggccactagcaccagcggaaataaatggcaaactaatttgagcttcagaaacacctgaaaggtccttcttagccttttcagcagcatcctttaaccgttgtaaggccatcttgtcttttgataaatcaacaccgttgtcagctttaaagccatcaactaaccagtcgataatcttttggtcaaagtcatcaccaccaaggtgggtatcaccatttgtggataatacttcgaagaccccgtcgcctaattccaagatggaaacatcaaaagtcccaccaccaaggtcatagactaaaatcttttcatctttgtcggtcttatccaaaccataggctaaagctgccgccgttggttcgttaataatccgttcaatgtttaagccggcaatcttaccagcatccttagttgcttgccgttgggcatcattaaagtaagctggaacagtcacaacggccttttcaaccgtgtcacccaagtaatcttcagcaaagcccttgatatattgcaaaatcattgctgagatttgttgtggggtgtagtccttaccttcgatgctaactttgtaaccagcttcacccatgtgacgcttgattgaagctaccgtattcgggttagtgattgcttgccgcttggcaacttcaccaacttgagtttcgccatctttgaatgccacaactgaaggaaccgtccggccaccttcaggagtggtgataatcttaggttcattaccttcaagaaccgctaccgcagagttagtagtcccgaggtcaatcccgataattttattacttgccataaattaacaaacctctttttaatttagtatttttattgattaattactgtgccacaacaaccattgctggacggagggtccggtctttcaataggtaaccccgttgtaagacttgtactaccgtatcagctggatgatcatcatcaactggcaccgtttgaacagcttggtgaatattgggatcaaacttttcgcccgcagccgcaatttcggtgaccccatgttttttcaaagcatcctgtaaatggccatagaccatttcgacacccttcttcaactgttgggccgcttcatcgtcagctggcgttgccaaagcccgttccaagttatccagaactggtaagacatcctttgcaagtgcttgaccgtcatatttcaacagcgccgcttgttcttttttgttgcggttttgcatgttgacgatctccgcctgtgcacgcaataactggtcatctttcgcatctaattgcgctttgagatcagtaatttgttgtgtcggatcgaccgctgtcgtttgctcagcttgatcatcagtcgcactcgtcgctgcctgtgtcgcttcactggcagttgacattgctgctgaatcagttgttgacgcttgtgaatcttccggcgtcgtccgcgttgatttctttgccaatgttttcatctccctgtccgtcactcgtcaaagtaccggtaataatctaataatttgcgggctaattctcgttggaacgcacccatcagtccaatcatccgtgaatacggcatggcggtcggcccgagcaaggcaatcacaccttgtccgtgttgatcaacatcgtaagtcgcggtaattaaactgtagttcttcaacaaatcgttggtgatctcattaccgattcggacttgaatccgttgaccgggtggaccaatcacgttagctaaccggtccgtttggtcgagtaacgagtacaatgactgtaactctttagggctctgctggtccgtatagttgaacaaattcaacttaccaccaacataaaagcgctcggaagctgccttggacaacacactgccaaaaatatctaagaaaccatctggatcttgcaaatactgtgcaagttttaacggaatctcatgcgttaattggcggaggacgtcttgtaacggcaggccaaccagttgatcgtcgatgaaacgaacgaccggttccagctcatcgccggtaatgtcactaggaatagtaaacgtctggttttcaacgtcaccattattcgtcactagaatcgccattacttgatgattccccaacggaacgagtctgaaaccactcaaccgactatctttaagttcaggtcgcaatgtaaaggtcgtgtaacttgtcagttgcgacaagatatccgccgactgagcaacgatctcatcgatcttgtgaaattcaccgcctaatgaatgttgaatcaccttcaagtctttgccgtccaccttttcaggctttaggatatggtcaacatagtaccgataccccttaatcgatggaattcgccctgaagacaaatgcgttttgacgattaatcctaaatcttctagtcgggccatttcattacgaattgtcgctgaactgaccttgatcggtagttcttgaactagcgatttggatccaactggattaccgccctcggtatagtcacggacaatggcctttaaaattaggctttgtcgttcagttaacgtgatcatcacctctttttagcacttaacttaatggagtgctaacacaattactaatataacaaccaccctgatgaaagtcaaggaaagacaaagtatttctagaaaagaatgcttaaattattaggaccccagtcccactatgactggacttatttgaccgtcgccccccaattagcactccttacttacgagtgctaatatacaccctcacccttcacaatgcaagcatggtgcctagcagactactcgcttttctgctgccattactcagcacaccagccacaacaaaaaaatctcaagagttacagactctcgagatttttgactagcctgatgtacattgccaacagacattctagtgaaacctggccttaacggtaatcagctttcaaactaatcaacgttcagctttattaatggcatgatcaatggtttcattatcaaattgttcttgtaagtacgcttcattgtcgattggcaagtgcacatgaaagtcagcaaaatgttgaactttcagcgtcgcttgttcgacttcaaaccccagcaagtgtccacctaattgatggtctttacttagaaagtgtaagtgaaagccaccgaccgtagcgccttggaacaaatgcggtgcgtagtagccaataatcgttccgtcaacatgttcaccggtgaattccggttgtgttgccgttgccgcgactaatgttttgtacggtggctcctgacgaggcgcgactcgcgtcttgacttttgcaaaggtcccatcgacgcgaatagccgcaaacacgttggtcaaacgatagtcatgaaccacttgttgctcgaaatcagtttgtgtgattgcagctaattgcgcactaatatcaggcttttcaaagtgcaccgatgcaaatggtaacgtctcttcgggctgaatttcccgaatttgaccatcctcacgtgcttgataggcgtgacctcctagaataatcacttcaccattgagaccgtctaacgtcccaatacccgtatcaccatgggttaagagttcaccagccgtaatcgtcccgtcaaataatccgggaacaagtaagcctaatgtgccgtgttgaaaaattgttgttgtgtccattcattgtgcctccaaacgatttgattgttgtgcaacttgaatccggggtgtgaccacaaagggatgcgccacataatagtcacgggtgttttgttcatcccgctttaattgcgcaaccaaggcatccgccccagcaaatttaatttcaccgcgcatccggtgcccccaacgcaccgttaaattgtggccataaagatctccttggaaacctaataagtatatttcaaccgtgattggtcggtgatcaccaaacgtgacatttcgtccaactgaggccattcccataacccagcgtgtcccaatctgcaccatcgtcgcgtaaatgccaattccgggaacccgggtattgggcccgtgagcaacgttggccgttggaaagccgagcgttcggccccgcgcttcaccatgaactacttcgccggcagtttcatattgatagcccagtaaccggttagccgtatcgatatctcccgcgtccaaagcgcggcgaatccgcgtggaactgatcttttcagcatctaattccgccttaggaacttcaatgatttcaaaccggttatgaccatagtcattcaaacgctgcatatttgcaatttcagctggcccgtacgtgtaatcaaaaccagcaaccaccgtttgtgcgtgtaatccaacaattaactgatcgacaaacgtttggggtggcatggcaccgaccgtggcatcaaagtgaagtacatataagatgtcaacgccgagctcactcatcaatgccgttttttgatcaattgtcgttaaataacggacttgctgcggatcagtgtgtttaaaaacaactgacggatgctggtcaaacgtcatcaccgctagtttggcgtgttgcgcctgagcggcctggcgtgccattgcaacgacttgctgatgtccacggtgaacgccgtcaaaaaatcctaaggccaatacgattggtccttcgggaatctgactaaacgccacggggtactttaaattaatcacctgcatgacaaaaactccttaattgaccgcaaacattttgaacggcttgtaccgctgttcgtccggtcgataactatatagacattttaggctgttttggtaaactaacgcaaccatcgtgttcgcatctggatcagtttgttgcccttctgccgccgtaataaaggccccattcttgacccgttgccactgctcatccgttaacgtgactcgcgggtactgacttaaagctttatcaattggcgccaataatgctccggccgttccagcatcgacgtgggccgcgatttcctcaaaggtcacggtttcatctaaagtaaagccgccactctttaatcgggtcaaatcactcatcacagcgggtaccccgagcactttgccgacatccaccgctagcgtgcgaacataagtccctttactacaagcgaccgtaaaatagatcgtctgagtctgggttgccgagtcataggtagatgcctgccgttgcttgaagctgctaattgtgacatgccgttctgggcgctcgacagtttcaccactgcgcgcatagtcatataaacgccgcccatttacttttactgctgaaaacatcggtggaatttgcgtaatggcccccgtcatctgtgccagcgcagcatcaacttggtcacttgtgaacggctctgtgaccgcttggcgcgcaatctcctcaccatctaaatcttcagtagtcgttgcaaatccgagggtaatgctcccttggtattctttgccagaagccactaaaaattgcacaactttagtcgcattcccaatacaaatcggtaaaacgccatccacatttgggtccagtgtccctgaatgacctactttgcgggtctgatagagtcgtcggattttagcgacacagtcaaagctcgtcatcccacgaggtttatataatggtagaatcccgttcaacataaaaaacgccttcaatcatttaaattcggtttctagtggcagccaatcaccgtgccacggattcgatcgttcttaatcgacggttttcagtataccacacctcacaaatatgtaagcggattatcacagaattcaaggccctgagcaccgcaactaagataccccaaatcgacacgctggtccggtgccactgacgaccacgtatgtgcctggcaaagctgtatttaactcattgatccagaaaaccgtgagcttaatccctattagtcaaataaaacgactgaaaaacaagaatcgcacaaattagtccccttatcaaaaggataccgcgcgggaccgtccctaattacgccgatgactttcaacatatgctgccatcaaaaaagcgtgcaacggccttagtgtggctgatgtacgcttattcaatgttatcgtcttaaaatgcaaccggcacgctaaccgcagttgacagctacatggttcttcaagcttggagcgcaactggctgctgattcaaccactgctgaatttgacgggcaatctgctggggtgtcagttgatcggttgcgatcgtcaaatcggccgcatcagcatataaggcttggcgccgctgcttcaacgcaatcagtgcccctgtatccaattcattgacaagtggtcggctagtatcatttttaacacggttaatagtggtttgatcactagccgtcaaccagataactggcaccgcgctttgtttcaggctaattgcattcattgcaatggtcggagtaccaccaccggtcgataaaatcccgggtgtttcgagtgcttggagcaaagtctgatgctccaattgccggaagtacccctctccttgctccgcaaaaatagtcgtaatcgaccgtcccgcccgctgaacaatcaaatcatctaaatcagcatgtttagttgctaacccggccgccaaaagccgaccgaccgttgttttcccactacccataaatccaattaaaattgctcgcattcttaattcctccttacaatctgataacccgcatcagctaacaacgacgatgcttgcgttctcgtctttagatcactaaatgtcagttgcaagacaccatcaatctcttcacgagtctctaaaatatgaatattgactaagctcagctgagcctgtgcgagccgctgagtgacatccgcgagagcgccaacacggtcggggacgttcaaaaacaaatcataaaagtttggtagtcctcccaactgttccggtcccaagtgatcacgcgtcaccttagctgtcgcaaaaaattcgtacaatgttgcttgatcatgcaccctaatggctgtcttgatgcgcaacagttggtcaatataatcctgcaattgattggttattagttcagcattagtcatcaggatggccgcccacatcgtggggtccgaactggcaatccgagtaatacttttaaacccaccagccgctaatcgcaacccgagtgccgaatctgccaaagccacctgagtctgatcaactaaagccgcagcgacaatatgtggcaaatgacttaactgtcctacaatccggtcatgctgtattgcagtgaccgtcaaccatttgacgtgagtcgcttgtaacaatgcttgcagccgttgaacggctgcttgattagtccggcccggcaccaacaagtaaaaggcgttctcgaataagttggcgcggccagccgtcacacccgatttatgtgaacccgccattggatgaccgccgatgaaagtcacaccgtgctgttgtatggcaagcgcggcatgcatcaccacttgtttagtactcccgacatccgtcacaagcacccctgccttgagtggcatcatagccagtcggtgcaagtcagcaacgatcacatcaactggccccgctaaaataatcacatcagcgtcgctcgcgaccgcggccaaatcagtgccactagcatcgatcataccctgttgacgcgcataactcaggctgacatcgtcacgatcaatcccaataatgtgcaccgtgggatgggcctgcttaatgcttagtgccaacgaactgccaattagccccaaacctttgatcaatacagttgtcatcttcacaccccctggcttaaacgtgctaaatcttcaaagaacgtcgggtatgaaatgttcacagcttcggcggactctagttcggcgggagcggctaatcgcaacgctgcaatcgccatcatcataccgattcggtgatcgccatggctggctaatggctcggtcggctgccgccaagacttgcgaccatcaatcacgaagccatccggttgcgaagtgatctgcacaccaagttttcgaagctcggtcacaatcgttgcaatgcgatcggtttccttgactcgtaattcagcagccccattgattgtgctaataccattcgcagtcgcagccaacaatgcaactagtggcagttcatcgattacggcaggaatttcagtagcagtgacttggaccgggtgcagttgtgcaaaccgcacgtcaagcgtgccaactggttcgcccattcggtgtccatgatcgaccgtcacttgaccacccatccggcgcaaaatgtttaagaaacccgttcgtgtcggattcagtcccacgttcgttaaccggacatgtgaatttggaataatcgtcgcggctgtcacgaaaaaagcagccgaggaaaaatcgccaggaatcgttagtgaccgaccaaccaaggctggctgcggttggaccgtgattgttcgctgatcaggcgccgtttcaatttgaccaccaaattgttgcaacaaccgttcagtgtggtcacgagtcggtaatttttcaataattgtacttgcttgatcggcctgcaaggctgctaaaatcaaggcgctcttaacttgtgcactagcgacctgcatctcggtacaactaccatgtaaagtccgaccagtgatcgtcatcggtaagtgcccggctgttaattgtacctgcgcccccatggcttgtaatggttgacgcactcgctccatcggccgttgactaagagacgtatcaccgaccaaggtcgtctcaaacggttgaccggctaacaacccagttaataagcgagtggccgtccccgcattccccatgtctaatggttgttgtggttgggtcaacccatgtaagccgcggccactgattgtaacggtcgtatcgacacgcttgattggcacccctaacttttgcagcgccgttaaagtcgataggcaatcggcggctggcaaaaagtgatgcaagatcgtcgtcccttgactaattgcccctaaaatcaagcctcgatgtgagacacttttatcgcctggtacacttaagtcaccttgtaacccactagctggttgaatacttagtttttttatcattaatcatcatcacctaatttatttgatagacgcaccacaccatcgaaggtgtcaaacgtgcaagttcacgttcatgagtcgtcagtgtcacgtttttctcattagttagcacgtaggccgcctgattacgttgataagcctgatacgctaaatatttactggcgactgtttgcaccacgacctgatgcacgaccctcgtcaacaattgggcggtcgctgcatgcgtgtaaccaatttgattatcggcatttactcgttggagcacgacaagtggatcgagctgggtcataaaacaactgctcaacgttaattgggacaataatgcgtaatgtatatccccccagctggcattcagtgtgtctgatttgaaagcagctggtatcaccagttggtcaccagaataggccgttaaatcagttaaaatggtttcaaagctcgggtgttcgacaatcaccgcttggtcctgccagttgcgatgattataaacttgcgcggccgcgtaactatccgtggcggtcgggcctaaagtatgaatctgcataagccctcctaatattgtcggagttcttcgcggtatgccgtcactgtttgctggaagcgagctaagttactcccgtcaaacgttgccgtcaatgctcgcgttaattcaatcgctaccacactttcaaccacaatcgaggcggggacgatggccgtcgtgtctgaacgctctacgctcgccttttggctgactttggtcgcgatatccacactttgtaatggtttgtaaagtgttggaatcggcttcatggcggccttaacaacaatcggcattccattagtcatgccaccttcaaagccgcccaaatgattggtcaaccgtgaccagccggcgtgttcatcccaactaatctcatccatcacttggctaccataatggctggcagccgcaaatccatcaccaatttcaacacctttcatggcgttgactcccatcactgctgcagctaactgtccatctaatttggtatcccagttcgtgtaactgcccaaaccagccggcacattttcggcaacgacccggataacaccacccaaggtatccccggccttcttcgttgctgtgatcagctcatggatttcgggaaccaaggccgcatctggtaatcgcaaatcattttgcgcgatttgggcttgtaattgatcaacggatagtgttaaatcggccgtcacttgcttagggccaatttgttgaacgtagccaactaggtgaatatctagctgcgccaataattgcttacaaatctgaccgatagccactcgcatggctgtctcacgagctgaggaacgttctagcacgtttcgtagatcgcgatgaccatacttcattccgcctactaagtcagcatgccccggacgtggacgagtgacttgccgcaacgtattggttgccgtagctggacttaccggatccatgattgctgcccagtgcgcgtgatcgcgattcataatcgttaatgcaatcggggaacctagcgtaacaccgtgccgcacgccaccagtgatttggacggtgtcatgttcgatctgctggcgattgccgcggccaaacccaccttgccgggctgcgaggcctgtattaatggcatcaatgtctagctgtaagccagccggaataccggtcagcacccctgtcaattgaggcccgtgcgattcgcctgccgtaacgtaattaatcatgatcaatatcctccttgtgtaaattcgtgtgtaaatccgtctgatatgcgcgtgagttatgcataattgcttgataaatagcttgtaaataaggggtatgcgcggtctgggtactcttcaccgcaacttgttgtaacacccgttgttcacgttgctggtctaataccggaagttgctgttgttgcttcaactccccgatggctgtaaccgtctcaaaacgttgattgagtaatcggacgatttgctggtcaatatgattgatacgttggcgttcttgactaagtgtggttgggacatgtagcgcccatacagctaggccgacaaaggcgagaccactgacagcaataactaaatcaaagcgcatcgcggtcgcaatattttgctttgacagccacccagtcacgagcggaatcgtgaaggaagcaatactgccaaacgtgaaataaattcctgtgattcggcccttgatgtggggatagcctttgataaataaattgaggccgacctgcatcacgccacccgcagcagtaaacccaaacccgaaagccgccagcatggacagcccagccgctggactataacagataaccgctaacgccagcagcgagccgccattcattgccaacaacaatttggtttctgccaccccacgacgtaacaaccagaaaatcacaataacgccggtgattgacccaatgctgtaaagtgaaagcaaccagtgcgctaacactgacgaaaaatgcaacgtcgtagtggcaaacaagctgacccactgcgtgtagaggatcataagtgccatcgaagtatacccataaccagctaaaccaactgtcgccaaccagcgccggttcttaagtggttgctgggatacgcccgttccggcttgagcaacttgattttttagtggaaactgctgccggttcaacaggatactgttgaccactaggattgccgcggccaggataaatgaccagccataccagattcgttgtgcttcaaagttggcaacgagcagtggtaataagaattcaccggcagacatgaaggcctttaacaagacattggctgagccttgccgcccacccatttcaataaacgtcgtgtaggttcccgcatacaacgcggagttcgcaataccggccaaaatcgccaaaccgtatgccagctgaatattagtgaccaatgccatccccacaaagaacgtgaagtagcaagccatgccaagattgacgaagactttacggccaaaacgatctgataaatttcccagaataaagtaggccagtaagcgcccaatgccaatcccagaaatgacataggaaaccgtcgctaacggggtctgccagtgttgacttaacgcttgcatgttttgcgttaaaataattaagccaataccatgaataaagtagtttaagtaaagactgattgataattggtgctgacgcatgaataacaactccttcgtggaaataaaaaaagccggctagattgtgaaaatctagccggctcatcaaaatttaatcctaattgatgatattattccagctagactcacggtgtctagctggccaagatgaattgacttcgcttagacacgaacgtaggtgccgtccgtatctaaggttccaacacgggcgctacctaaaataagcaaagccataataataagttgcgttgaatgctaacgtcgtcataatcatctatcctttccgtttcattgattgcttatattaaaacattctcattttgattcgtcaaccctaatttcattttaattttgcaattaagaaatcattttcgcttgtaaaagcgccacgatgcgtaattcgcctcatcctactactatttacaaaaatcgtcttcagtacgactactcattaaaccaattgtttgcgacggtcgcgagcaggctaccttgattagtcagtctaccgacaacgttcaagcagtgtgtgaatgactagtgtgaccctacaatcagcaccatctaaaccgcttaacctcagtgattgacagcgaacggctccattcaatttgaacacaaaaatagtcgctgtcaatccatctggattcacaacgactatttttccagcgcctaatcttgacgctttaagttattaattaattcatcaatccggctaccgtattgaaccgagttgtcgcgttcaaaagttaattccggggttttatagatgctaagtcgtgagcctaattcactacgaattaatcccgtcgccttagtcaatccagccgccgtcttttcaccatcggatgccttatctgacaaaatactgtagtagatggtcgcttgttgaaggtcgccagttaccgttacaccggtaatggttacacccgcaacccgtggatcacgaacccgttttaacaaaatatcattaacttcgcgttcgatttcctgttccaaacgaccaactcgataatgttgtgccatctgctaatcccccttttaaaggttattcaactggaacttccttcatcacgtaagcttcaatgacatcgttgactttaatatcgttgtaatcttcgattcgaagcccaagttcaaagccttgtttaacttccttaacgtcgtccttgaaacgccgtaagctagctaacttgccatcataaataacgacaccatcacgaatgacccgcacaccagaatcccggtggatgacaccatcagtgaccatcccaccaccaatcgtaccgatcttagaaaccttatagatttcacggatttcggcttgaccagtgatttcttctttataagttggttcgagcattcccttcatcgcgctctcgatttcatcgatcgcgttgtagataacttgatgcaagcgaatatcaacatcgtcagtatcggcttgggctttggcttgtggtgttggccgcacattgaacccgataataatcgcgttacttgcttccgccaaggccacgtcactttcgttgatcgccccaaccgctgtatggatgatattgacccgcacaccttcaacgtcgattttacgtaaactaccagctaaagcttcaacagaaccttgaacatcagccttaataatcacgtcaacttccttaagttcaccttgtttcattgaatcaaacaagttatccaaggtgacgtgagcagtttgcttccgttcttccatcaatgcctgcttagcacgttgttcaccagcatcacgggccgtcttttcatcatcaaagaccacgaagcgatcaccagcatccggcacatcattcaaaccagtgatttcaattggcgtcgatggcacggcttccttgatccgcttaccatggtcattggtcatcgtccggacttttccgtaagtattccccacaacaattggatcaccaacatgcatggtcccttgttgaacaagtaacgttgcggtagaaccttttccacggtcaagactagcttccaatacagatcccgcagcattttgcttagggttggccgttaattcgagcacttctgactgaagtaagatcatatccaacaattcatctaggttcttaccgaacttcgctgaaatctgaacaaagatcgtatcgccaccccaatcttcaggaatcagaccatattcagtcaattgttccatcacgtggttagggttggcacccggcttatcaatcttgttaacggcaacgatgattggtactttagcagccttagcatggttgatggcttcgattgtttgtggcatgaccccatcatcagcagcaacaactaacacggtgatgtcggtgatgtcagcaccacgcgcccgcatttcagtaaaggccgcatgtcctggcgtatccaggaatgtaataaccttaccatcatgcttaacttggtaagccccaatagcctgagtgatcccaccggcttcgccctctgtaacgtgagtatgccgcaattggtccaatagggtcgtcttcccatggtcaacgtgtcccatgaccgtaacaaccggtgcccgtggcgccaaattgtcggtattattaacttcatcatcaaagaacttgtccaaatcggtcacatcaacttggaccttttcttgcgcattgatcccgtaatcagtggctaagatttcaatcgtatctttatccaaggactgattttggttaactgcaacacctaacatgaataacttcttgataatttcagcaggctcacggtgcaataatttacccaaatcctgggcattcatgccgaccgtgtaaaccagtgtttctggcaacggcttgtccttacgaactggcgctggcttattattgacctggcggatccgttgattcttattgttccggctcttattgttccggttgttacgccgacggttattgttgttaccgccacgataacgaccaccaccgttattgttgctattcaaactaccaccaaagcgaccgctgccattacgcgaactattattcgacccattgctccggttactgttgttattattgttgttcgtcgtagtccggttgttgttccggttctgaccaccattattggtgcgattaccggtactgttggtacggttgttactcgtatttgagcgattgttattattagaccggttattattattattgttgttagaccggttcgtattgctcccaccgttattacgagcactgttgctccgtgaagcattggccgaacgattgccgttattactgttagtacggttaccgccattattgcttcgattaccgttactattacgactttgactattattttggttattattacgattattattcaaagaatcaccactctgttgatgacgcgagttggattgctgctgattagcagttcgtgtcacattttttgctacggcttgcgtagcccgactcgttttagctggagccggttgagatttaggatgggtaactgtggtcgtgccttgtaactggcgcgcctcactgtcaccgagtgtcgacatatgatttttgacggagaatcccaactgctgtgcttgcgcaatcagctgtttacttgggacgttgagctccttcgctaactcataaattcgctttttccccatatcttcaccctcctttactgtgtcatgatcgccaccattttcttggcaaatccggcatcggtaattgcataaacagtgcgcttattaccagtaaccgtatttaattctgctttagtaaaggtatcgatcactggaacatcataagattgggccttatcatgaaactttttggcagtcgtgggaccggcatcgctggcaataaagaccagtttagccgtctgattacgaattgcagccagggctagcccttcgcctgcaatttgcttgctggcacgccgtgaaaggcccagtaggtttaaacaagcttgcttaggcgtcatttccgaagagttcctttcgggcttgttgatgatcaacataagccactaactcatcgtaaaagtctgcacccactttgataccaaacgccttatcaaaagtcttttcttgcttggcacgttgtgcaacttgtacgtctaaggcaatgtaggcgccgcgtcccggctttttaccagtcggatcaacggacacttcatcctgcttattcttaacgacccggactaagtcttttttgggatgcatttcacccgtcacaatgtcctttcgtaacggcacttttctttttttcataatcccagacctcctttagttacttcactcacttagtgacgaacttattcagcgtcacttgctgattcatccacagcagtttctgaggcaggcgtcgccacggctgcgtcggacgttgctggttcctcatcttcgccggtatcggactgcactgccgcgtctgatgctgcttcagtcgtttccgtttcggcaactgcaacatcatcagggtttgcatccattatatcagaagcttcggtttccgatttaatatcgatcttgaacccggtcaatttagcagctaaacgagcattttgaccacgcttaccgattgccaatgataattgataatctggaacgaccacggtacaaccccgctcattttcaggatcaaaaataacatccaaaacttccgctgggttcaatgcattcgcgataaatacggcttgatcatccgtccattccacgatgtccatattttcgccgtgtaattcattgacaatcgtttgaacccgttgtcccttgggaccgacgcaggtaccgactggatcaacgttaggattgtttgaacgaacagcaactttcgcccgatcaccggcttcacgtgcaatcgaaacgatttcaacgatgccatcgaaaatttcaggaacttcttgttcaaacaaacgtttcaacaaatctggtgcagtccgcgaaacgaatacttgggggcccttcgttgcgttttcaactttcgagacgtaaaccttaattttgtcatgaatccgataaacttcaccaggtaactgatcagaacgacccatgaccgcttctactttgcccaaactaacgtagacaaatcggttatcttggcgctcaacttcaccagtgacgatttcattttcatactggctgtattcgtcataaataatgccacgttctgcttcacgaactcgttgcatgatgacctgcttagccgtctgcgctgcaattcggccgaagttcttcggtgttacttcaaatcgaatatcatcaccgatttcgtaggctcggttgatagccaatgcatcttgcaaactaacttctaaacgtgaatcaaagacgtcttcaaccacttctttaacggcataaacgtgaatattacccttaatttggtcaaagtcaacttcaacgttttgagcctggccataattacgcttataggctgaaacgagtgccgcttctaaggcttcgatgacaacttcttttttaatgcccttttctgattcgagggtgtctaaggcccctaataattccttgctcatgtgtagactcctttacttatttagaactttaccgctaagcgggcttgtgagatttgttctcggttgatcgtcaccgtcttgtgacgtgtcttatccaagtaatcgatggtcaaagtggtcggcgtcaccgccgtcaaatcaccttcaaaaattttcttgccatccaacttctggtataagccaacgtgcacgtacttaccaatagcattttgaaaatctgcttccttcttcaatgggcgttccgcaccaggagaagaaacttccaaaaagtaagcttggggaatgggatcaggctccatcgcatctagcttttcactaagttcatcactaaccattgcacattcttcaatattaatgccgcccggtttgtcaatgtataatcgcaaataccagctttgaccctcgcgaacaaattcaagatccacgagttcaaactggtgagcactgacaatggctgcggccactggctgaatggtttcaacaacattactactcaaggctgcgcctcctattcagattagtccaataaaaagagtgagcatcgctgctcactcgttaacgagttttaaattacaacccatatattagcacaattatgttgaaaccgcaagtttacgccatttatagcatttagccgttagctttcaagtcacggtaaacttccgcttcaacagcctgacaattgccggtgtatcaacattacaggccctaaatcagataaatctgtctgagtgctgttaaatgcatcaaccaccgcaaaaattcatcaaactttaacaattgtcgtgttttctagaacaacgagagttggttttcatctggcaaatcacttaacacaccattttcagtcataaagtcgatcaaactcttcgacacttttccacgcttagacaggtcttccttcgacaggaacggcttgtccgctcgggcagcaacgatttgcttggcaacgttcaaccctaaccccggaactgctcggaacggcgcaatcaacgtatcaccatcgatcagccaatccgaagcatcagatttgtcaaggtcgaccatggagaatttaaagccccgctccaacatttcgttggctaactctaaaacggtcagtaagtttttctccttggcgctagcatccatccctttgtcagtgatcgccttcattgacgctttgacagcatctttaccatgggccatcgcaaccaggtcaaaatcgtcagcacggactgaaaaataagccgtgtaataaatcaacgggaagtacactttaaagtaggccacccgcaacgccattaagatataggctgccgcatgggcccgcgggaacatatacttgatctttagacaagattcaatgtaccagtcgggaacgttggcatccttcattgcttgttgccattcatccgggatcccccgacccttccgcacgtgttccataatttggaaagacatatcagattccatgccgtagtgaatcaagtcggtcatgatgttatcacgacaaccaataacttcggccagcgtaaccgtgccatccttgatcaattcttcagcatttcctaaccacacgtcagtcccgtgtgaaagtcctgaaatctgaagtaattcgttaaacgtggatgggtgagtctcttcgagcatcccacggacaaaccgcgtcccaaattctggaattcccagcgtccccgttttcgagaaaatctggtcttctgtgactcctaaaacttcaggactggagaaaatcttcatgacgtgcggatcaactggtggaatactctcaggttggacacccgacaaatcttgtaacatccgaatcatcgtcggatcatcatgtcccagaatatcaattttcaaaatattatcatgaatcgaatggaaatcaaagtgggtcgtttgccaggccgcactctgatcatcagccggatactggacgggcgtgaaatcataaatatccatgtaatccggcacaacaataataccggccggatgttgcccagtcgtccgtttaacgccagtcgttccctttgctaatcggtcaacttccgccgaacgaagtgtttgattcgtatcccgttcatacgccttgacataaccataaccagtcttatcagcgaccgttccaattgtcccggctcggtacacatttttctcaccgaacaagactttggtgtaattatgggcaataggttggtagtccccagagaagttcagatcaatatctggcaccttgttcccataaaatcctaagaacgtttcgaagggaatgttttgcccatcacgcaccatgtcagtcccacattcagggcaatccttaggtggtaaatcatagcccgatccatactcgttattcgtataaaagtgcgagtactgacaatttggacaccgataatgcggtggcatcgggttcacttcagtaatcccagacagcgtcgctacgatactcgaaccgactgacccccgagacccaaccaagtaaccatctttattactcttaaacactaggcgttgggcaattaagtaaatgaccgagaacccgttaccgatgatactcttcagctctttatccacccgtttttggacgatttctggcaacggattaccgtaccacgcatgggcacggtccatcgtcagtttttcgatttccgcttcggcacccttcatccgcggagtatacaacttatccttgaccggtcgcacgatttcaaattggtcagcaagcgcgcggggcgtgtcaaccacgacctcatgtgccgtctccgtacctaagaaatcgaaatctttaagcatctcatccgttgagcgaaaatgcacgtctggccgttcagtccgatttaacgggttaccgggctgtgaatgaatcaaaatcttacgataaatcttatcctcaggattcagataatgcacatcccccgtagcagcgaccgggatattcatctcatggcctagttccaccatgttgctgataatttcttccaaatgatccgtatcagcaatcaaaccactctcgatcagcgccgaatatgccggtttcggttgtacttccaggaagtcatagtagccggccttttgtcgggcctcttccttccccttttgcatcattgcagtaaagacttcaccactagaacaagccgaaccgaccaggatgccatcccgatacttgtttaaaacactgcggggtacacggggcacgcggtaatagtactcaacattcgacaaggaaataattcggaagagatttttcaaccccgcttgggtttgcgcatacaatgtcgcatgaaatggccgggcatggcgataagccgcattttcattcatatgatcattcagctgatcgtggaattgaacctgataacggtcctccgcatctttcaaaaacaggtggttcaaatgaccagtcgtctcagcatcatagatggcgcggtgatggtgctccaaattaacgttgaattttttggctagggtgtttaagcggtacccgcgtaaattcggatacagccaccgcgccagcgtcaacgtatcaataattggatttgtaatcggccccatgtgatgccgggcatagcccgtattcataaagccaatatcaaaggtgacgttatgaccgaccacgattgcatcaccataaaattcgcggaaaagtttaaacacttcttcttccgatttagagccccgcaccatatcatcggtgatactcgtcaaattagtggttgtttccgacaagtgaaaaccagggtcaataaattcctcaaactgatcaacgacgttccccttgaccatcttaaccgctgacaattcgatgacccggtcataaatggcggacaaccccgttgtttcagtatcaaaaataacgtaggtggactctttcaaatcaacgtgggcgtcattataagcaatcggcaccccgtcatcaaccatgttagcttcgacaccgtataaaattttgatattatttttttcaccagccgcaaacgcttctgggaacgcctgcgcccccgaatgatccgtaatcgcaatcgccggatggccccatttagcggcttgtttgacataatcactgacactgttggttgcatccatctgactcatattagaatgcaagtgcaattcaacccgcttctcatctgccggcgccgtgtcttgccgactggcatgcgacgtttcgttaatatcatacgcattgatcgttaaatcgcgcataaaactatcttcctgcacagaaccacgtacacgtacccacattccaggcttcagtgccgcgaattgtgcctcgtcatcagcattccgtgagaacttcttgacgaccattgacgaactatagtcggtcacctttagaatcaataactgccgctgggaacgtaacgtccgcacttccatatcgaagacatagccttccacgacgaccgaccgttcttcttcagtaatttggaccatctgtttagccggctcttgcgggttgatctgcttgcctaattggacaggaccatcaattggtgctggtgcatccgcctgcttttgccgtttctcattggcctttttgatagccgcttccgctttttgagccaacgcttgatcagacttcgctttttgttcatgaaattccttgatcttcgcctgtgaagcactctcatcaatcatcgtgtggacggagaacttcgggaagcccaagcgatgataggtactctcaatcggccctaatgcttggttagttagaaaattttgaataacttcattttcagccaacaaaatgacccgaccatcttcataagtcggcacgttgctgttacacaatgattggaccaggggcgacttgatcccactgtgctgaacgatccattcccagtattcagctagttcacgaccattgacctcggtatcatcagtcacgatcgtaaaggtcacgcgtgcaatttctttaaaggcgatttggagtttgttttgaaaagtcataaattgtgtataaggtaaaacatgttggaaatgcaaatgaaattcccaaaccttggaagcttgatgaacggtcaatttatcgatcgctgcttctgtaaattcaggacccgttggcatttcaatttgttcgagtaacttcttgaacatttcttgttggtttaaactcaccagtggtcctccttttgttgattacaatcagttagtaagacacgcaccgtacttgttaatttgcgcttgcatatatattaaagcaaatccaatcttaaaatcaaaagccgctaaccgtgacccgctagaaatagaatctcgtttcaacaatgacttagtcgctaacaactaacccaatgccaagcaagacttttaatattaactagaaccccaattaagtgctcaaggccgcggtccacagttggcactactttgtcagtttgcttaaccgacagcgtgatgcctcggtgattaacggcatctgaaataatcttcagcgaacgcacaaatcgttcacttgaaacgttactattttatcacagtctgaccgttgagccacgtgattaatcggcaaacaaaaatcacccagtcaacagaatccaaccaggtgattgttgttggcgactatcaacgggtagttgccatatttttattaacttagttttgcagcattttaatcgatattcttgagcagaacggccaagttgttggcgatttcttcctgtttaacttccaaagtctcaccagtctggcgaagcttaatctcgacgattccttcgctggcctttttcccaatggtaatccgagcaggaatgcccattaagtcggaatcggcaaacttcacaccaggacgttccttccgatcatcatacaaaacgttgtacccagcggcttctaattgtgcttcaacttggtcggcaacctcaacctggtccgctttcttcgggttaaccggaatcacgtgcacatcaaatggtgcaattgcttttggccaaatcaacccattttcatcagcgcgttgttcagcgatggcagacaacaaccgtgagacaccaatcccatagcagcccataattaccggaatattacgtccattggcatccaagacttctgcgtgcaagtctttagaataacgggtgccaagtttgaaaatatgtccaatttcgatacccttggtgaacttcaagacgcccgcaccatctggtgataactcaccttcctgaacaaagcgaatgtcaacgtaagcttccgcgtggaaatcacgttcagggttgacgttcgtgaagtgatgaccgtcttcgttagccccgaccgtaatgttgaccatgtccttcacatactggtcagcgacaattttaacgtcatcatgaacgttaactgggccgagtgaaccaaagctagcgcccaaatattgttgggcttgttctggcgtagccatttccaagaaatccgcaccaaggtaattcttcaacttaacatcgttgacttcatgatcgccacgaaccagtgccattactggctgatcgtctgcaataaacagaatactcttaaccagttggtcagcaccaacttttaagaactcagccagttcgtcgatcgtgcccactccgggagtatcgatcttttccatatcctttaacgaagcatgtgacttctttgggacgtataaactccgagccatttcaagattagccgcataatcactcgcatccgaataaacaattgtatcttcaccaaccggtgcgatggccgaatattcacgggaatcctttccacccatcgccccaccatcaccgatgattgaacgaaacttcaaaccgacccgctcaaaaatattctgataagcttgcgccatatcttggaacgtgtcatctaatgaggcctcatccgcgtgaaatgaataggcatccttcatgatgaactcacgcccacgaagtaatccataacgtggccgatcttcatcacgatacttagcctggatttgatacaaagtcaatggcaaccgtttatacgatttgatttcatcgcgaacaattgacgtaaatgtttcttcgtgcgtggggccaaggataaattctcggtcatggcggttcttcagcttgaatagttctggaccgtatgtctcataacgcccagttgctttccacaactcagctggaatgactgctggtaccagcatttccgctgcatcaattttttccatttcttgccgaatgattttttcaatattcgtcaatacgcggtaagccaatggcaaataagcgtacattccggctgaaatttgtcggatatagcccgcccgtaacatcatttgatgactcaaggcttcggcatcattaggcacttccttgagtgttgggattaacaatttcgactgtttcatctacaaatcttctccttattgttccaaattaaatatcacttagaagaaatatcgctgaatatcattccaagttactagaatcattaataacatcaggaggccaaaaccaatcaaggtaatgacactttccgtttccacccgtagtggtttaccccgaatgccttcaacaatgtttaataatagtttaccaccatcaagtgctggaatcggtaataaattaacaattccaaggttgatcgacagcacggcgagcaaatagatcaccgtgcgcaccccggacttagcggcttgcgaggtcgtggcaaagattgccaccggcccacctaaatcgttcaaactgaacccgtgagtgaccatccgaccaagcacttgaaaaatctgtttggtaattccccacgaaccagtaaagccgtatgctaacttggcccccagactcgtgtcggtcttagtcgcccattggaccccgatttgaccgattcgattaccagagaccgtcttggcagcaggggtaaccgcaatttttttagtctgaccggcccggttgatggtcaaagtcaaccgttgcttcgggctgtcttgaatcaacagcgaaatcgattgggcactcgtcatttttttaccgttaaccgccacgatttgatcgcccttttgaataccggccgtacgggcaactgagtctgctgtcgtcgccgctacgtgggtcgttgtactcgtaacaccaccctgcataaaggcaagaattgcaaatgtaatgatggccaaaatgaagttattcatcggtccggcaaaattcgtcaacattcgttgccataacttggccgattgaaattggacgtcgaccggtgcaatttgaacttcggtaccatcgctttcaacgatcgtagcgtcatgatcgacggcgtagtgtttaacttcactttcgtccccgttctcataaccttcgatccagagttctttttcgagatcagtcgccgtcactgacagtggaattccattgaacaacgttgtcttcttactagcattgattgaatgaacaatcccatccggaccaatttgcaaactaactggcgttccgggcttgagttcttcatcttcatcatcggccacaccggccatccgtacgtaaccaccgattggcagaaaccgtaacgtataagttgttgcattacgacgaaacgcgaccgccttgggccccatcccgacagaaaattcacgcactagaatcccagcctttttggcaaagtaaaagtgcccaaattcatggacgatgaccaagattccgaaaacgataatgaacgtaataattgtaacgatcaattaagcgctcctttctcccgcgtttcgggtactcagcttaaaagaggccgaataaatgtgcaattggaaaaactaataacatactatcaaatcgatctaggataccgccatgtcccggcaagatcttaccagaatccttaacaccatagtaacgcttcaacgcggattctactaaatcgccaaactggccaactactgataagactaaagtaatcagtaccatactgatgacgctagcatagccgacgtgaaacccaattgcaaaggcactggcaacgatcacaccaatcacgctacccccaatacaaccttcccatgttttattggggctgatcggtgtgactttatgccgacccagtttgcgtccgaccatgtaagccccactatctgtcagccagacaatgaacatcaggaagagtaacatgtaaacactgacaccccgcgcagccgtgaagtagttgaagcccatcccgatgtacaggacgcctaacgtcaacattccggcatcatcaaatgaaaagcgattccgcgaccacacagtgtgtaacagtagcaagataactaagaagtaaaccacgtactccttgtttaattggtctggtaagccattgaaccagttattcggtgcaatttgaatcataactgcaagcatgcttacgattgcttcaaatgaaatcaataattttttacgcatcacgagtaactcgctcatcgcaacggcccctaacagcatggccacaatatctaaggttaccccgcccacaaaaatgactgggataaataaaattaacgcaacgacagccgtaatgactcgttgtctcataccaaaaactcccttttatttatgatccgacaacccaccaaagcgccgatcacggctctgaaaatccgcgatacaggcttgaagggtcgccgctgtgaaatccggccacttcacatcagtaaagaccagttcactgtaggcaatctgccacattaagaaatttgaaatgcgttcttcaccactcgtgcgaatcagcaaatctggatcattgtatggcgcaagtggtgccgtcatcagtgctgcgtcgatggttgcatcatcgatatcaccaaccgccaattgaccatcttgcacttgctgggcaattttttgcaccccggtcacgatttcggcccgtgaaccatagttgagagcaaagttcagcaccatcccatcacaatctttggtatctgcaatcgcattttggactgctttttgcgttgcttctggcaagtgatcaacgtagcccatgacttgcacccgcacattattttttatcaagtccggtacgaaagtatcaaagaaactcactggcagttgcatgaggtaattaacctcatcagttggccgcttccaattttcagttgaaaacgcgtaaagcgtcaggactttagcgcccaaatcacttgcggcaatcgtaatctttttgaccgtgttcataccttccttatggccagcaacccgtggtaaatgccgtgctttggcccaacgcccattgccatccataataatggcgacatgggctggaatacgttcaggatccaattgcacgtcggtgttatctgcaggatcattcttattaaaaaaagcgaacaaggcgcacctccataaaaatagcttaactatgcactattttaccaaaaaaagcactaattaactattcgtcaacaaaaaaaggcttgaatttctccaagccttaataaattggtcggtcattaaccttccaaaatttctttttctttgtccgcaacgatcgcgtcgacgtccttacccgcttgatccgttaacttttgggcttggtcttctaactgatgtaactggtcgtcagtgaattgaccatctttatggcccttcttcaaggcttccattgcatcacgacgcacgtttcgaacggcgaccttggcacgttcaccttccgccttaacgtccttggcaagttctttacgccgttcttccgttaattgcggaataactaaccgaatcgcagaaccgtcgttagctgggctaataccgaggtctgacgctaaaatagccttttcgatttctttaagggcactcttatcaaatggggtcaccattaagacccgtggttcgggtactgtaattgccgccatctgattaagtggtgtttgcgcaccgtaataatctgcagaaatccgattcaataatgatgcgttagcccggccagcccgaatattaccgagctcgcgttgtaaagcggcttccgcctttttcatccgttcctgtgcttcttttaaaattggttctgtaattgccatattatttccccctgactgttgtcccgatgtgttcaccggcgacgactttccgaatgtttccaggttcattcaagttaaagaccacgacaggaatgtcattatccatcgataaggaacttgccgtagtgtccatcacttgtaaccctttgttgataatgtcgagatgggtaagcgtatcaaatttaactgcactagcatccttgttaggatcagccgagtaaacaccatcgacgccatttttggccatcaaaatcgcatccgcgttaatttcagcggcccgtaatgcggcggtcgtatccgttgagaaatatggactcccggtaccaccggcaaaaataacgatccggcgtttttctagatggcgcattgccttccgccgaatgtatggttccgcgatttgtcgcatttcaatggatgtttgaacccgggtcggcacaccaattgattcgagattatcttggagtgccaaggcattcataatcgtagctaacatgccaatataatcagcttgggcccgttccatacccatctgggcaccagcttcgccacgccacatattgccaccgccaacgacgattgcaatttgtacgcccatgtcatagacgtccttaagttcctctgccaccgttttaatgacggggggattgattccaaagcccttctcaccagctaaggcttccccactcagttttaggattacacgcttatatttaacttccgacatcgttttgtcctcctcgaaattatctgtctatcattttaccatatatttcaataagcgtttggtatcagccgtaatccggcgcaaaaattaaccgaattctctttttaaagcggcttcaacccgttactttacaaaaagggactacgccgaaaattgctttccgtcgtaatccccaattagctaatcccttagtcagtaattagtctttaatttggttcataacttcatcgatgaagttatcagccttcttttcgattccttcgccaacttcaaaacgaatgaatgagctaaccttgccaccctttgattcgacaaagtgcgcaacagtttgatcagaatccttaacgaattcttggtcatccaagctaatttctgaaagccacttgtttaaacggccttcaaccatcttttcaacaatcttttcaggtttaccttcattcaaggcttccttaacaagcacgtctttttcatgagctaaccggtcagcaggaacttgttcacggttaacatattcaggattgatagcagcgacgtgcatggcaacgtccttagcagtagcactgtcagcaccgtctaagacaactaaggctgcaatttggccaccgttgtggatgtatgaaccaaaactttggtcagcacccttttcaacaacttggaaacgacgaagactgatcttttcaccagttacttgagtcgtttcgatgacgtcatctttaaccgtcccgttagccgtcttcaaagctaaggcgtcgtcaacggaagctggttcttcttcagcgatcttgtcggcaacttcagttaccaagttcttgaacttgtcagttgaagcaactgaatcagtttcacagttgatttcaacaatggcagctttgttgtccttgattgcaacagcagcaatcccttcggcagcaacccggccactcttcttctcggccttagcaacccctttttcacgtaaaacgtcaacggctttttccatgtcgccttcagtttcaactaacgcctttttagcgtccatcataccaacaccggttttatcacgaagttctttaacttgtgctgcagaaatctttgccatagtttactctcctttgagtatcttgattttagataaaaagctgcccgcaaaatcaggccgtaatggtccgcgatttttaggcagcctaattatttcaattaattatttgtcagacttggcgtcgttgtcgccttcaacagcttcaacgatgtcttccaatgagtcaacggacttcttagcgtccttgttgtccttgaaagaatcttcagtaacatcttcgtcttcaccttgacgaccttcaatgacagcatcagccatcttagaagtgatcaaacgaacggcacgaattgcatcatcgtttgaaggaataataacgtcaatgtcatctggatcagtgttcgtatcaaccatcgcaacgatcggaatgttcaatttttgagcttccttaacggcgatttgttccttacgaggatcaacgatgaagattacatctggaatccgaggcatgtcttcgataccgcccaagaacttttcaagcttggcacgttgcttcattaataatgaaacttccttcttaggtaaccgttcgaaggtgccatcagcttccatcttcttcaagtctttaagacgcttgatccgtgtttggatggtgttccagttagtcaaagtcccacctaaccaacgatggttaacatagtattgacctgcacgggttgcttcttcttcgattgaatcttgggcttgtttcttagtcccaacaaacaagataacaccatcatcagccgcagcgtccttaacgaagttgtaagctgagtcaatcatcttgaccgtcttttgtaagtcaatgatgtagatgccgttccgttccgtaaagatgtatggtttcatctttgggttccaacgacgagtttggtgaccgaaatggacaccggcttcaagcaattgtttcatagaaataacagccataataaatgtgcctccaaaaaatttgttttattcctccccaccgttcaactaatcatggcactctcccgagcaccgccatgattatcgcagtaggtgtgaattggttttaacaccgaaaattagtataccgaaaattactagtgcttgcaagcaatttcatcaagaatttgtgaattcctgaaagtgtgttaaaatacaatctcgcatagggggctcacttaataatgataaaagccatcatttttgaccttgacgatacgttgtatgatcaaaaatcaccgttcactgctgccttaactaaaacttttaaccaggctttgagcagcactgaattggcacaaatttttaaccggttccatgattttaatgaccgtacctttaaccaggtcactgatacaactatgacgctggaagcgtggcaaaccgcccgtattcgacacgcgttagcacccagcaaagtccacatcagcactgatcgggctatccaatttgaaatggcctatcagcaggaactaaatcagatttgccttttcgatgggctgagtgcgacgctgactaaactcagtcacgcttttaaaattggtatcattaccaatgggccagcgccgattcagcatcaaaagttacatcaattacaaattgaacatttcgtgcatccggataacatctttatctcagaagaattgggtattgctaaacccgacccatcgatcttcacgacgtgggcccatcaggttggcatcaaggccaacgaagccgtttacgttggtgacaatgcagcactcgacatgaccagtgccaaacacgctgggtggcaaactttttggtttaatcaccggcgcaatgaccaggtgacaccgagcgtaattcctgatcaaatcatccagagtccagcggaactaaatgaactattgctagcacttcttcaagccgccagcgcttcatagacgcatactggcgttaaagctacgagcaacttatgctggtaacaaccacggtaagtacgtgctagcaagacctttacctagcaacacttaattgtgttatcgctaacaaaatcgctcacttgtgaagcccacagtcgtgcaaccagctctattgtgggctttttgttatggataataacagcattgaaagtacgcttggggttaacgcttcgaaaaggccccatttaggtgaaagcataaaaaatggcgtcactcagatgagtgacgccattttcagtgataatcgagattaatcaaacttaacttgtgtgtcagctttaccagtttcgatgaattgtttgttactgttcattgaaacgtgcaccatgttgtgaacggcagtttcagtgtagaaagccgtatgtggtgtaatcaaaacattgtcgcggttgaacaagttcatgaagaccttgtcatcaatcgtttgaccttcaaggtctttgttgaagatcttagtttcgtattcatacgtatcaagagcggcaccggcaactttgccactgtctaaggctttgatcaagtcttctgaatcgatgagtgtcccacgagcaaagttcaagatgtaggcgccatctttcatcttgctgaaggcatccgcattcaacatgtggtagttatccttcaatgcaggaacgtgtaacgtgataacatcagcttgggcgtataattcgtccaaggtgtcaacgtacatgccttccttttcaagttcagcattccggtaaacatcgtaaccgataaccttagcgccgaagcctttgaaaatatcgatggcagcacggccaatccgaccagtaccgataacaccaacagtcatggtgttcaattccttggcaatatctggtgcccaacggaagtcttgcttagctaacttcttgttgaacaatggggtttgacgtaataattgcatcaattgcgttactgataattcagcaatcgcatttggtgagtatgcaggtacgttagaaatgtttaagccacgtgctttaacagtaggaacgtccaagttatcaacaccaacgttacgaagagagatgttcttaaccccttcgtcggctaacttgttcaatacttcagcagtatagtccttttgttggtatacatcggcaccgtcgaagcctttagctaagtcaacgttgtcttcagtaagtaattctggaactaatttaacttcaacatctgggttttctttcatccaagtatcgaagaatggacgttcgtcatcacgtacagcatatgcaataattttcattacaaaaattcctcctatatattgatacagtaaatattataacagtaaatgcgagaaatagaatcataaattgtgaaaacttcgctaaatttttacatcgtgagctgacaagtattttagcttggcagctcgcgattggtgtttgaaggcatattcagcctttaacgcacttgatttgtcactgaaagtttcatggtaaattaattgcaaaggccgccgtgagctgacccgcgtatatttagcccctttgcccgcattgtgcgttgctaatcgtcgctgcaagttatccgtaaaaccaccatacaacgtttgatcagcacataataggacataaaaataatattttttggttgccgtcgtggacgcagccggcttacttgtgcttgccatagagtaatgtgtgcacctcttccctgtattcaccatcatcacgataaacgacaagcggtggcatgattcgaacaccgttgcgtttcccatccttgatcatttcgatcagaaccatgttcgcttcccgttgtgctttgggatggacgaaccgaatccgtttgggtgccaaccgattggtcgccatggtactgaacaagtcatctagtcgttcaggacgatgaacaaaatatgctttaccattcatttttaacaaatcactagttaccgctaggatctgatctaaattagcggacagttcatgccgtgcaatcgccaaatgaggatttggatttttaacgctctgcggtcgatctttaaaatacggtgggttacataagactgtatccaccgaatctttcggtagttggcgcgtaatttccagtaagtcttcgttcaggactgtcatttgttgggttaaatcgttcaaaacaacactgcgttgagccatatcggccaaccggggctgaatctcgaccgccgtaatatggccttgagttttagcactggcgaataggcctactgcgccattgccagcacagagatccacgatctggctcttaacgcccttcgcaacctgggcaaagtcacccaacagaacagcatccagtgagaacgcaaagacttgagaactttgaatgatttgaatatcttgactatataattgatcaatacgctcatcggcgtgtaacgtgacgtctgccatattcggccacctctccattcaattcgtcgcacagctatcatacaattaacttgcagaatttgccaaatttcgtcatactgtgagcagttattaaacgaaaggaagatcgtgatgttttattcatttatgcgcggactagtccggctaatcatcaccattattaacggtcggccccgctatcaaggacgggaaaacctaccagagggggcctatatcttagttgggccacaccgcacgtggtttgacccgttgtactatgcactggctggcagcccaatgaaatttagctttatggctaaggaagaactatttaagaatcccgttctgcggttcattctcgttcatgcgaacgcctttcctgtcaatcggcaacatccaggaccttcagcaatcaagacccccgtcaaatttttgcgcagcggtaagctttcactaatcatgtttccatcaggaacgcgccactcacaagaacttaagggcggtgcaaccgtcatcgctaagatggccggtgttccactagtcccaaccgtttaccaaggcccattgaccttcaaacaactctttagccgtcagcgggttaccgtccgtttcggtcaaccgattgatattgatcgtaaactgaaattggatgaagctggtcaaaaacaaattgagactaaaatgttgcacgcttttgacgacttggatcgtcaaatcgacccaacgttcaaatacgttgatcctgctacaacccgtcagaaacattaagttcgataataaaaaagtgtcggtgatcgcaatttaaagcgagccgacactttttactacttgttatcgtttttagatgcagctttcatcgaattcaacatctgatgtaacttcttttcggatgggcgttgacccatttgcatcatcatactacgaagcatctcttcactaattggtggattttgcttcaagtaattttgcatatagtgccgggcaccgaagaaaccaccagttaacccaaccaatacgccgataacgacgattaaaatccaaattcctgtagacacagtcattcccctcccttattacagtcttcattaaactagtctacacaaattaataataaaagaaaaggaaaatttgtcagttgacaaattttcctgaaatcggttaatcatctcgaagaccgcgatcgcgttgcacttgacggaccttttctggcgtaacctctttaccatctttatcataaacctgaagcatttcaacttgttgccgaaaaccggcgcgaaattccttcaagtatttttgccgcaactcttgacgttcggcttcttctagctcggtgagcccctcggctttcgccttatgagctaactcattgatccgagcaagcaattcttttgaaatcaaatcagcagcccctttcactcttgaaatatacacgaaaatagaccctaaatcaattaacagtgtttgtcaaccgaacatttgtttgaaagctatgaaacgctatgctacaattggtttaaccaataatgaaaataaaaaatgaggtgccaagatgagtaaaacatcggaaagcaaacaaatggccgttcttcgctttatttatgaacgtgtcaatgaaaaaggatacccgccaaccgttcgtgagattggtgaagccgttgacttatcttcgacttcgaccgttcacggccacatttcacggctagaaaaaaaaggttacatccaaaaagacccaactaagccacgtgccattgaggtaacgccagccggtttcgaagcactgggcgtcgaaactacgccacatcaaattccggtacttggaacggtaaccgccggccaaccaattcttgccgtacaggaagcgacggattattttccaattcctaaggaacttgaatcattcggtggcgaccttttcatgctcaccatccgtggcgaaagtatgatcaatatcggtatcatgaatggtgatcaagtcattgttcggcgtcaaagttccgctgacaatggtgatatcatcattgccatgaccgatgaaaatgaagcgacttgcaagcgattcttcaaagaggccgatcactaccgactacaacctgagaacgacacgatggccccaattatcttgaacaacgtctctgtattaggcaaagttgtcggtttatatcgcgacatgctgtttcagtaaactatcacccacaagatgacaattcaatttgtcatcttttttgttcgccagtttttagagcaggttgatggcatgcctacagattccactcacaaatatttacacccttcccgccgtgccagggacgagagcacgttatttgcgacaaaagcacgcccccattccgaattcaccttgccataatcccgcaatgcccaaccgattgccttctgaataaaaaagtcatcatcaccccgattcgttagtatcgccgtttgtaaattggcaatccgtcctctttcaagcctaatcgaagcgcgatacctactcgtcgcacctatttatcggtagctcgtaaatataccacccacttgttgtaaacaaccgtgcgctgagagatacgctgcaggcaccttgcgccaggcatcaacactatcccactgtggcgttactgtgatttggtggtagcaccattgctattgaatcagcggcgcctgattctcccgatgtatcgacagaaaaagtgctggcgtcaaattggttattagtcggatctcttttcaaaatatttcaaatctgtgacgaacagccaatagttcaatggtataatgattatactattttaaacattgggagttggttacatgttgttcctagccattatgggcttgattgtttttctattagcattattttccgtgatttacgcacgtcaaaccggtggtggttggaaatttctaacactaattacggtcctcagcgccctggtcaccatctacgcggtcgttaaattgccttactggccatacaaccagtcacagcaatcggcgcgcaaagcatcatctagcacgagtactagcgctagtaccagcaagtccaaatcaacgagcttgagttcctcacaagtcgtttttaacgaagccagcaccaaacgcgcggccgcaacgactaagttgaatgaagaaaatatccttaaacaattacaatctaactatcaatcgattggtaccgttgcattcaccaagtcaacgaaaacatatacgattacgccaaccaataaaaagtacgttaaatctttgaagacgattaaatcatatccatctcaaaaccaaaaagcaatcaccacgattacttcgaattttaaatcgttgtcaaaatcgctccaaaagaatcttgccgctggttacacgattcagttgctacaaccagataccactgacaagacgctgttgagtgtccaagatggtcaaattatgaccaataacttcaaataggaaaagtcacttgtctagaaaatttgctagtaacaagtgacttttttgtttaaacttgttgatccaaatattgacgttgttcgttcttttgaccggtcaatacgaatcgatggggatcatcagcatagctgaccgactgatcatcggcccgccattgcaattgatgactgaataaggcttcatactccgccacactaactcggcgacgacgagccaaccgttgtggtaggccatgatctaaaccggtctgataatccggctgaataaccccggtataaaattcaccctcggcacccgagccataactgaataatccgagtcgattccctggttgtaactgaggatcagtcagtaactgcgataacaagctcaaatagagtgaaccagtatacaagttaccaacttgtcgatttagctgacgcgcatgttcgaagtgcgccaaccactgggcttgtttctcggcatcaactaatggtaacacgcttcgaagcgctttaagtcccatctttgtatatggcaaatgaaaaaccaaggccgtcagtgtgtctggactagtttgagtcgtttgcaggtaattcttaaacacatcttgaaaataatcaatatagatattagacgagtatttgccgtcaactagggcttctgtatgatacaacggtcgccaaaagtccatcacatcttcgctcagtagacttgactcagtacccagtactaatactttaggatccgcactaattaacatagcaaccgccccaccaccttgagttggctcgcccggtgtgttcaatccgtagcgtgccacgtcactaccaatgaccagcgcctttttatctggatgaacacgcacgtgatcttgggccagttggacaccagccgtcgccgcatagcaggcttctttcatttcaattgttcgaacccgctgactcaaaccgagcaacttagcgacgtaaatcgcactcgctttggaattgtcgatccccgactcggtaccgacgactaataaatcaatagccgcaatgtcagtcgctgtcagcatcggtgcggcagcattagcagctaacgtcactacatcctgactcggcggaatcaccgccattttagactgaccaataccaatcaaatacttatcaggttctgcctggcgagctgttgccagttccgccatgtctacgtataaatgtgaagttgcaaaatgcaacttgtcgattccaattttcacgtcttttcctccaatttgttaatgacaataagggattaatatgcacgtccgcgtggccctaagtaatgaaaatcagggtcagttccgacccgatagcagccgaaagcccgactaatttcattatgaaaagtcacaacaattgccggtgtcgcccaagtagacgccgcccaaaaaacggtgtcatcaaacgcccggttgtcattcgggtagcggtgatagccttgtacattgtcccaaatggtgccgtgcgtattcaaccaatcttcagcaagtccggcgtccacctgcatcatcacgtcttgattatcagcaatcaaactacttagtttttgccaatcgagttgccaatcatgaatatggggattcagtccgcgtgtgccaagtggtgtatgccccaatgcgatcggtgtcaattctacaaagtccatcttgaccaccccgttcgttaaccatcctaagatttcttaactattatagcatttcacgacaaaaatactgcccgcaattgcttgacctgggacgggttccataatttatgctgttattaaataaggcgatcaagacaagcaccaagtaaggagcgcggtaaacatgtggttctcacgtcatcaaaaacgaaatagtcttcaggcacctgtcgctggtacttatacggcgattcccactgccacatcaccccaacaaatcgggctattagccatacaaccgaccagtccggtgattaatgccccgattgatggtgatatcattagcctgtcaccctcgcgtctcgttatcaattcgctgagcaatcaacatattgaactgcgtatcgaccggacgaacttccacaacaactgtacctggcaagtacgcgtgggcgattccgtttcaccattaacaattgtagggacactttatggatccttaaaagacgtcaccatcgctgtctatcgaattgataccattcaggccactaattgggtttcactcgcaaataattagctgtttacggctatagattcatatccgctaattgggcatttcggttgtcaaaatataaatttgacggttgtgaatatttctaagtccaccttgacacccatcgcccaatctcaaaaagataaatcacaataatcacttttccaacagcttcaacgggccatgctactgtgcccagttggagttgtttttttgcaaactactcaacactgccaggtgtgaaatttgaaataacatgacgcatcgctgtcgacgtacttgattggtggtgtaattgacaagctatcgtgacatcattacaatttttgtggtttgatatttgattgctttataccttaattcaagctatgatattcatactggtttaaaattcctttctttattaatcagggctcctactgattaatagatcaatctaaaaattataaaaaggtcggatacaattatcatgaaaaccatgagtcttgttgttccatgctataacgaggaaccaacgattgaaatcttttataacaccgttgaaaaagtcctggcagataatccagagtcgttcaaggatatcactactgaatatgttttcgttaatgatggctcatctgacgacactttgaacgtactacgaactttaaacgccgcccatcctgacactgttcactatgtctccttttcgcgaaatttcggtaaggaagctggtttattagccggcttagaacacactatcggcgattacgtcgccgtcatggacgttgatctacaagatccaccaactttattgcctaaaatgctggcgatgcttcaaaccggtgactatgactgtatcggaacaatgcgggaaaatcgtgtcggtgaaccaatgattcggtcattcttatcacgctcgttttactcagttgtcaacaaaatttcaaaagtacaaattattccaaacgcccgtgattaccggttaatgacacgtcagatggttgatgccatcttggaattgcccgaatataaccgattttcaaaaggcatcttcaactgggtcggtttccgaacgacttatttgaagtttgagaatcagccccgctccgctggcgaaacacactggtcaatttggcagctgttcaattattcaatggacgctatcgtcgacttttcagatgtacccctgaagattgcgaccttcaccggtggcttgctctcactaatctcaattatcagtatatttgtcgttattattcgtaaaatattatttgataacagcgtcagtggttgggcttcaaccgtcacaattttgctcttaatcggcggcatccagctgttctgtctggggattatcggtaattatattggtaaaatttatatcgaatcaaaacaccggccccactacattgtgcaggaaaagaagtaaacttttcaacctaaactgagacgcatacgaccatatcgggaaaatggtatggtcgtgtgcgtttcggcatctggatgaagttaaaggttatgaatgaaattattatttaaaagctcttttgggggcatcagtccttgtcaagttgatgaatgaaataatatgatttttaattacttttcaaacggcttcatcgcggtattcaaatgcggtagagccgtttctttgtactattcgtatgatttcattaaagtattaaaagcctggttaaaggtatcaaccaccgcctcgctggttggctgacttaactaaagatgttttagagcgccgtaaatcgggctttgtgcttgttattagcccataaacgacttcggtggaatcggataatcctacttggttagactgagttacttgatttaatttcttacttagtttgtttgatgcgttgaggccgcttaatacaactttaacattttagatggagtacagatacagacatcaagtgtttaactgaaaacccaaaaccaatcgattcatgatgaagccacttattatagactgagcgcgacaaacctggcttgctaaacaaggtggcctgaacaccatgaatatccgagccgacggttttgattccttgataggctaatttatgttgtgcattcaatctttgtgctgtattttttggacttttttaaaaagaagtcaaacctcctgctccttgatttgaatcttaagttgacgtttcttgagccttagtcgttcaacctcagtcattttttcaattggtttcgtccatccaagccggtctttaagtgcgatgtaaccattggtggtggttttgagcatccagaaacggatttgctgataagatacattgtaatgtttcgctgctcgggaatatgcatgttcactcaccgtaatgtattcaacgattctaatgcgttcttcaaaagttatttttctactcataatgtggaccagcaattcactgatccggtcctccagccgtctagtacttctaaggccaaatctgatttgaatatcccacaaactactttcatcattcaagtacgctgatatggcctgccgcttaatctctgagatatatcgaatccaattgtgctgttcttttaatccttccagaccatcctgcatataaaaattttgacatctgatgaaagtacttcgagcgataccacacgctttaaaacacgttgatttagtcaggttagttttttcaagacccagaataatagctaatttttctgtgaccataaaattggttctagatataataaaatctccttaaaattgatagatgaagtatatcatttcatctatcaaccttaaggggactatagcacttaaaactgtctggctcgttttggttactgaatagtgtccacttgctaacgattatcggaatctaatgtaccgtgtacatcgtttcagtcctatctgaaactcggaaaccatttttcaacggcaccgctgctggtaatttaccaatagtagtattaccagcatgacctacgtacacatgcgattggccataatgcgtatcagccttagcttcatcagccttactttcaacgctttcatcgctggcataccgataatgtccattggttgtaaaggtctgcgaaggcaagtctggccgtagcccagcggcggcttgtagttgccgactcacctgtacgcgactgtccggataaacctctaccatactacggccagcaacatcaaacgttcgccactgaaatgtcaatcgttttactcgatatcgcttaaaagttttacgacttttaaacagtgttaacatatcgtgattcgtcaaattagtcctcatttgatctttcaaatcaccgacaactttggcccctttagacgaaagcccttcctgattcaagcgcttgaccattgcgtaaaagacggcttgctgccgaaaaccacggtgttgatcgttgtcaatatgtctttcgcgtgcataggctaatgcacgtgcaccagacatcgattgcaaacctgctttaaatttttctggttttccccagtaatcttgtccgataaaatcacgatcaacattaacttcaacgggaccaatatcatcgattgccctaataaaaccatcccaattaacagttagataataatcaattggtaaattcaaataatgttcaacggtcgctatcgccgctgcatcaccaccataggtatacgccgattcaatgcgctgataaccatgatattgctgcgaatggatcttaacaaaagtatcccgtaataaactacataaggtcattgttttagttttatggtttacaatgactaccatcattccatccgtgcgcgttgtcgataatttgcgcttgccactattatctaaccccatcaataaaaaagtactgaccggttgctgggtcaaattatgatgcgacttaataactcgtgactcatggaacgagtgcaacatgtcaaataaccgaataccttgaattgtgaaagctactaacataaaggttatacaactcgttactagtacaattagtcgttttctttgccatttaggtagttgccgccttctcataaactcagtccccccgcatttcattcatatcgcgcttaaattgatcagtaattgccattgtcttggcccaaatttgttgctcagtacgttgatttctaggcgtcttaatctgataagtgttcataatttgtgcaggtttccctcctagaacataaatgacgtctgaaagacgaaccgcttcagaaatattatgcgttatcaaaacaatcgcttgcattttaaatttcctgcgttcccataatgtgatcaaatcttgccctaaccgctgccctgttaaaacatccagtgctgaaaacggttcatccaaaaggagcagttctggctcaacagcaagtgcacgcgcaaaaccaacgcgttgtttcatccctccagatagttcataggggtacgcatttttcaacccttttaaaccaatcaaattaattaaattgtcaatttgattgtcaacatattgacagtcagaattaagctgactttctaggccaaacatgatattttgacgtactgtcaaccatggaaatagcgcaaagttctgaaataccatactcatacggcgattaggagccgtgactaaattaccatcaaaagtaatggcgccatagctgggccgaataatccccgcaatcattcgtaatagtgttgattttccgacaccagacgaaccaataatactaataaactggtgggtttgaacctgcaaactaaccgcttccaaaatcagttcagactgccgttgttttgaaagtataaatgactttgaaacgtgatcaacatctaataaaactgcttttttcaacttaaactcctcctcgtattaataatgaaagcgacgttcagcaaatcgatataatggttgccaaatcaacacaacgcataacccaacaatgacacaaataatcagtactccagttgcttctgcaggcttattattgatattttgggcaatgtaagcaccaagtccagtaaccgcatactggtgggtaccccagctaatcaattcagccgcaatatcagcattccaggctgccccagcagcattaataattgcggtaatgaacgatggaaacagtgatggaattaaaaagtgtgtccaccaacgccaccctgacaggtgaaaaatattaacaacatctttgatatcactgggaattgccagataccccgcgataatgttgaaaaaaagtaccattgagttccagtcattatcaatggaatgacccaccaatgctgtgtcgtccctgtcaacgtaatcattaatgcaacaattggaatataaatatccgcgggaattgatcctaaaacttgtccaaccggttgaatcagttttaaccgccgcgcattactagcaacccatacggcaagtggaataaaaataagcgccgaaagtaaaacagctatcaacacacgactagttgttaggaaggtccatttaaacaaaacactcaaattaatccaatcaagatattttattagtaatacacccaagcgatatagaccaacagctattactagccaccatgcaatacgccaatataccgtatatttttttaatatttgtataatccgtgaaaagcccagtttttgccattgctttggagcaccatataaccaccaataccggatatgacgatgtaatcgcttaactaacagcggcactttagccataaccatcaaatcatagacttgcgattgctgtggtagttggctatcggtactcgtaccgtatttataatgtgccgttcctttaatcagcggttgaaaaataaacacattgaccaataacacacagataactagcgcaatcactgcattaataacagcaccaaaattagctgtatcaagcgcaatctggatgtatgatccaattcctggtagcactaatgtttcatttttaggaaccacgatcgtcgcttgttcacaagcgactagggcaaaccaagcggccgattgagaaatgacaatattccatagaatgcttggcgtcgcataaagaaattctaagcgccagaatcgttgccagctattacagccaaattgcttagccactgtcatcaagtcttcgggcgtaacccgaagtgactgatagagagccaacataatattccaggcctgtgcagtgaaaacgccgaaaatagcaacggcctcaacacccagcacattattgggaaacaatcccatgaaccatgcagttgtaaacgttaaaaatcccaataacggcactgactccaataaattaacaatcggcaaaataacatagcgtgcacttcgatagcgcgctgctaatatgccaaaaatcaaagaaaacaatattgagtagcccattccaatgaatagtctcgttgttgttcgtaacgcagccgctactaaatgtgacattgttaagtagtctttacctcccgtagtatctaaataaccctgagtgggtaatcgactgagcggcaggttcatcttggcaatgcaccagccaatcataagcaatattccaatacttagtccaagccacatcatcgttcccaccacagaacgtactttaatccctctttttaaacttgtcatggtgactcctttccatgttcaagttgtttttaggcaaataaaaccccattagcaaattgcagctaatggggtaaaaaactaaaatggataacgatttttgcatcgacgcattcattgagttttagcactttaagacgtaagaactagtctagttatcttgaaagagccttaattcggcaaattctgctttactcattcctgtctctcgacatttctgggcgataacctatattcttaaagtaacctcacctaattgcaactgatttttattgctgatgtaatcaacaatgctatcatagtttcaagatctttaaccgtcaatagaaaccagctaatgataatcattaacaagtgattatttatactttttaggtttcctttataatcgtaactttttcttaactatttatctctaaacaaattactcgtactgtctagcttgaaatttggactttaattgccacaaaaatcctgttacttagtgaaaaattctcggtaccgaaaaaatagagcgcacgttaggatactgtgtcgcaagaaccaagccaacccccataaaatcgccaattatggccgaacctccctgactaacaaaaggtaacggaattcccgttaaaggtaacagcccaatcgtcatgccaatgttttcaaacatatggaaagctagcattacggctactccagtggaaacatagacataaaatcgacgtcgactagcgaatgctgagcgaaaaattagataaaacaagtacatgtaaacgataagtaagacactacagccaatgagcccagttgtctcaccaacaaccgaaaaaatcatatctgattccctaactggcacataaacagcgttatgagttacaccattcccagttaatccacccaccccaaccgctcgcatactttgccacaattgatagctttgatccgagacgccattgcttgggttaagccacgtattgatgcgatcaaactggtacaatttaaatccgatatgagataacagagattggcccgtgctcgatgtcgctaacaaaattaaaacaaccccaatggatccggccaccaataacacacgccacaaaaaactaaaccggcatggtgaaacaatgagcataccaataaaaattgtcagaaaaactaacgtcgttccaaaatcattgatgattttcaacgcaacaataattggaaaagtgtaaataactaagcgacgtgtcaaccgccaatccgcattaaaattattgtggggtccccactgttgatcttgaacgattaaccggcccatcattaaaatatagagcggtttcataacttcaactggttgaaaagtcagtgtaccaattgcaaaccaacttttagcccctgtttgaacataatattctcgactatagaagaccaataaaagtatcaataacagcatgccaattgaatagccaatcggggcccactgcatcaattgtttttcacttaggtgaagcatcgttgtcgctatcaatgcacccacaaggtaccagagacactgcatcattgtcgtccgaacaggatcaatcacttttaaatcatgcagacaagcatagtaaacagcccacataccaatacaacagagtatgatgacacataatataatcccccagccatagtcgccaatatgtttatgctcttgccaccgaccaagttctctattattcatttgttaccccccataaataaaatttataccgggcttagtatagcggtaaatccaagtattttatattttaagtggcttttttatgcttaattaatcgatttaaccggattctaaatattgcattaaaatcttaataatcgtggctaagcctcttgctagccacgataaattaattgatacaacatttgatcattattacggttaatattttgcacgttgttgactaatcgtcttaaaatcttagcgtcaatctaatatttgacgctacctttaaatcttttgaataaatatttattccagcagaaaattatgctatacttattaagtaccatatggagagttggcagagtggtaatgcaccggactcgaaatccggcgaaccggctaataccggcgcgcaggttcaaatcctgtactctccttattaaaatagtagagaccagccagtaaaaacaagaatcccaacaagcattgatttgtcgggattcttgttttttatataattcaaatcaaacaagtcaatatcaacatggtttgctacctactatactgtttggaaatggtatggatactactattacaaaataggttttagacttgagctactcttgcctgctccaaaattttggcactcaatatcaacgctttcttgaaccacctagaggttttctatactattggtttagtaacatgttctaaagctgcttctttaattgttgaatgccaattcaaattcattcacatcaatgccttattaaacatcggcacttgaaataatcataatgatcaacaacatcaatcaagtaataccattccccactaatccacaaaaaatatccgtcagcccttgccaacggatacccaattacttctgttcacgtgcggcttgaccaaaaacaaagaacgaaccaagaatacccacgcatgatagtaaaaataaaatgccatagcacagtacatcccccactgtcactaaagtcttcggaaaaccggcagttgagacccatagaaaaatcacgcttaaccaaaaccaaaatgaacgataaaaccgaaccggtcgacgtatccgcatgacgctcccccctaactcgtgattccaatgaaataaccgattggaataacgcctattataggcagtgcgcaattaggtacaagctctgaatactcaaatccgacgtttaagttacaattcataaccgattacgtttgttaagtgccaatccgattaatatgccccctcgcaacctcaatcacgacgagccagtttacgagcgataatcataaatcggtcttcaaacgtcgtgacgcgaccattaatggccagtaaggattgtaactgatgtaatttgggaagcatccgtgccacgtcaaaattcggaaactcccatggaatcaccgtggtataatagacaattgcgccaatatcagtaaaactcagtgccgcgtaggcttgctcagcccgcagaatttcaaatcccgcagcctgcatttgagccattaccgtcaacaactgattgtcaggatacgccggttcgtaatgctcatcaaagaatcgtgacaacgcataattattggtcgcaccaacttgctgaatcacaagtcggccccccagctttaaaacttccgcaattcgcttcactggcatcgcaccatgactattcgttacaatatcaaatgtcgaatttggtacggccgtcaactgttcggcggcatctggatataatgttatcccctttttaaccaccgtttgcttcaacaactcaatatttggttgccacccctcagtcaccgcagtcagcgctggctgatggttaaaacgccccatcaattcaccaccgcccgtatcaatatccaaccaccgatcatcggcacttagatgctcacgaactagggcagcgtaatcccacggtaagtccgcagtctgccaccggccagccagatgactaaagtcccagccgtgcatggattgctgcgcttcttcaaaccaactgctttctaaagctgtcatattttgcctccttcgtttcctataaaccagaccacccatcaaagtctccgctggcctatttcaatacgaattatgctatgattacaatatctttaaaaggaggttcagtcaatgacacaattactggtcacaaccactgaaaatattccggggcacccctatgaagttatcggtgaagtctttgggctaaccactcaatctaagaatctggtccgtaacattggggcgggcttaaagggcctagttggcggcgaaatcaaggattacaccaagatgctcgaagaatcgcgcgatgtcgcggtcaatcggttgcgcgataatgcaagtgccatgggtgcggatgccgttgtgatgatgcggttcgacaccggctccattagtcaggatatgcaatcggttgccgcatatggtaccgcagttcgttttatcaccgaagacttgaccactgacaatgcttaactgattcgagactaacgaaaccgcctgccggtaatctgggcaagcggtttttagcatggtggcagctgtttgtataacacaattataattttcgtcaccggcgaatgaacagacaaccaccacaagctaacagtaatcccatggccgtcaaataagccgcttctgggctcacgatattatccaacaagaccaatccaacactgccgattggaatcgaaatcgtcgccaatgaatttatgatgccgcctaaactcccaacgatactttgatcggccactttcaataaactcgccatcaatttaggatttgcttgccccatacaaaatcccccaatcatcatgattgtaaccactatccaatagttttgccaaaacaacagattaataaataaaccctcaaacgccacgacggtagttaacatgacaccacgaaacgtccacctctgaaagtaacctgtatgtaacaaattccctgcaaccgatccaaatacgtcagcagtattcatcacaagaattgcgactccgaatgaaagtggtaactgcgtcgcccggtgaatcaggtataaattcaatagtgcatcgacgcttgcacctaccgcattcaagaacaagacgctccccaatagcgccaagacgttcatgtgcacccccgcttccattgcttgtcgcacttgtcgtagcagttgacgaaatgtcgacgtcacggtgacagttgcggaaggtaattttagcgtttcatacccgaacagtagcaccagaccggcaatcaagaacgtgattgcattcaaatatcccgcgagacgataatcgcccgttgcggccaatagactgacacccaacgcttggcctatcgtctgcattaacactccgataccttggttgatccctaaggcctcttcttgtaactcagacgcgactttagcttgtaataatggcattcggaggctgccgctcaacatccccaacacgtctgaacacaaattgatgacaataataatcaacagcaacccgacctgtttttcagtaataagttgcgctaacacgagatataatgccgcttgaacaaatttcaaacctgctaaccacccccgcttattggtttgcgagtctgccaatcgaccagtaagcataccaaaaataccaggaagcacagtagccaccgaaactagcgaaaccatcaaatttgcttgtgcaaacgttcgcgcgtacgttaatagaataatgttaaataggctggtaccaattgtctcaaaaagatcagctactgttaacgtgacaaacgctcgattacggcctagatttttcataacgccacttccaatttaatattatttattgcttaaataaatttaaatgataaagcaactttaatcgtttgatttctatttgtcaaatggttaagctagtattgaggtgaaaaacatgtccaaaaacacactggctcagtttgcaaagttaatggccgatcccaaggtggccgctatcttaaaggccaccaaatctaaaactggtttaacaactaagcaaatttcggcccaaactaaaattcccaacaatcagttgtactacaccatcaacaaaatgcaggatgccgacttattaaccatcgttaatcaagttcaggttaaaaatctaactgaaaactactattccagtgcccacctctcccatgagacgccacacgatcttgatggtctcgatactgatctgactgacatctccggtacgtggactcaagcccatgtccaacaagttttacaatggatcatgctattgaaccacgactttaccgaagcctaccaggaagagatgacccgcaagcaacctgacaagtcagccatttttttcagtaacgcgatcctaaacctttcagcggtaggcgagcaccagttgcgcttagatttgatcaaattgcttggcgatgctgaaaagaatgatcctgatcctcagtcaacggacaagcgtcaggttaaactactcattgaaaagtggcaataattagaatatgcaattgttagtctttttggcttggctaccaaagaatcactgactatccaagctaactaacgaccaaaacaagggttagcaaaaaagctccgaatgactaataaatcgtcattcggagcttttaatattggctttaaaattgcatcaagctcaacatatcataatctttaatcttatcgcggccgtgcaactctttgagttcgaccaagaaagccgtcccaaccacgttaccgcctaattcttcaaccatttgaatcgttgctgagatggtcccaccagttgctaataaatcatcagtaactagcacattttgtcccggcttaattgcatctttatgcaaataaagtgcagactgcccgtattccaaatcataagtcgctttgaccgtttcgcgtggtaacttacccttcttacgagcaggtgcaaaaccaacgcctaattcataggccactggacaacccacgataaagccgcgcgcttcaggcccgacaatcatatcaacatgtttatcacgcgcaaattgcacaatctgatcagtcgcttcacggtaagcttccccgtcagccatcagtggtgaaatatcgcgaaaaatgattccaggttcgggatagtccggaatactagccacatacttttttaaatctaatgccatttgttcttaacagctccttcaattcttaaccgcagcctggttcttcacccatacttggagcgctgcagatttactatataaaagcgtttcttcagcaacgatttgttgttcgcgcagctgataactaggggcgtgatgtaaatccgcttttgccggattcgaaacgccattcatgacaccatcatttattttaacaaatccgacctcaaaaaacacctgaatcatgaaaataagcaaatttcgttcaatatgcagatgcttggccactaatgttaattgatgatgaatatcaacatcatggtgcgctgcggtaaactggaaaagtttcgcaaactgcgcgcgatttggcattcccgttaaataaaccgattcttgccgatataagtagagcgtcagctgatcgagcgcaattgtgctgagtacctgggtcatatccgccagcgtgtcaggacaatcgacaatgaagaccgcttgattagccgtcacggcagtcagatccattttcgtatcccccacccatacggcttgcgcttgggaacctaaatactgttcaacttttttcaacagacgctggtggaaaaagaggtaaacccccggtgcttgaaacaaatgggccgaaagatgttgcgtccgggcgtcgatcacctggatccccgtcactgcaatatccttaaccatgatttggggcttcgtctgaccgttccaagtattttcactcaactcacccactaacgtcacatcggtgggactcgcctgaatagccggcaaggcagtacccatcgaaaaaccgatagcatcaatcgtattggtgccatcacccagttgtaatttcaagtgttgctgatcactaccgatcgcgcgtgcttgcggaacagtcgttggaactaattcaaacaacggtgccgggttatccgttccaaagggggccaacgcttgaatatctgccagagttgccaaggttgcctcagctaatggtaacgtgccgtcaattggtaaactgacttgcgcattatctgctaattgctgactaaccgccgccgcttccatcgcctctttaagcgttgctaactggtcggccatgacagttagtccaaccgccatatgatgaccgccaaaagccaccaatgactcccgaactgggtcgattgcggcaaataaattatacgcttcgacgctccgaccactacctttgagccggccatcatcatcctcatttaacactagggttggtttgccagtcgtttcgaccacgtggctcgcgacgattcccaaaacaccctcgtgccaaccatgcccggtaataactaaggtttggcgggcctcattttccggcgtctgtgcttgctcgattgcactggcactgattgtcttgaccaagccttggcgtttttcattcaattgattgacctgcttggccagcgcggtcgcccgctcatcgtccaaagttgtcaataattctacaccgctctgcgccgactgcagacggccaagtgcgtttagccgaggggcaataccaaacccgatattggtctcggtcaatttatcgggaatcagtccggcttcttgaatcagtgctgccaagcctgggcgggtcgtctgctgtaagaccttcaggccgagcgttaccaaagtccgattttcaccagttaagctgaccaaatcagcaaccgttccaatagcagccagatctaatagttcctcgggtacttcctcaagtagcgccgtcgctactttaaacgccacaccggcaccagaaagaccaccaaatggataactgccctctggatgtcgtggatggacaatggcgtaagcgtgcggcaattcagtcggtaactcatgatgatcggtcactacgacatcgatgccctgttcctgcacttgattgatgaccgcatttcccgcgacaccgttgtccaccgtcacaaacagcttcgttccagccgcaatcagccggtcaaaagcggcctgattaggaccataaccatccttgaaacgatctggaatatagtaattcacgttagcgccaatttggtccaacgtttcatacataattgacgtacttgttaaaccatctgcatcataatcaccgtaaatggtaatttgatccccggcaataatcgcctcttggatgcggtcaacggctttttccatatcgtgcatggtcgttgggtccaacaatggttgttgatccgcgtgcaggaatggggcggcttcttccgccgtattaatgccccgcattattaataaccgggcaactaagggggtcacgctggccgcctcagctaacttatcaacatcggcttcatcaacggccgttgttaaacgtggcacccactttttctttgccgctaacatggcatccttcctttcaacaacttacttatctgctggcgtggttggttgttctgccaccgctcgtttttgtttacctttattattcaaacgcaacgttaattgcttattttcggcagtcaacttgtcaatcttagcctgggccgctgctaaagcttcactatgggctgtccgttccttagattcattgaccgtcgccatcagtactgcggtaatgacacctaagatcaacgtcaccacaatgaccaaaatcagtggccaatgaactgctgtaattccaaaattgattcgaactggttctacgtttaaaattgcaaaaataatcactactagtgcaatgactagtgcactcactaaccgccattgattcttcattaaattcatcccctatttaaaattaaaaaccgtccccgtcagccaatccccgagcttgggtgccagctgataacctaaattagctgcagacatcacccaaggccgattcagttcgcgccgttgatgcccgagtttgcttacaatcaattcagcaaacttaacggggttcaatgccagctggtcgacccggtctaaatagtgccccgtgggatccgcaattttgaaaaagtccgttttaatgggacccggattgaccgtcaatacgttgacatgagcatccttgagttctaagcgcaacgcattatcataagcaataatggccgccttactagccgcataaacggctgatttaggtgttgcgattttgccagccatcgaggcgatgttgacaatttcacctgcatgttgcttgaccatccgttgcgcagccagttggctaacatacatggttcccaatgtattgacgcgcaacattttcgccatcaccggcgcatccatggtgatcaccgtggtcatatcgccaaaaccggcagcgttaatgaccacatccaattgaccaaatagctcatcgatggtcgtaaagacgtgatcaacgtccgccacgtgacccacgtcacaagtaatcgccacggcctgcccttttgataacagacgacattgatcagcaacctgtgttagccgttctcgccgccgggcggctaagacgacattggctccctgactcgccacagctagggctagttgctcgcctagtccactagacgcgccagtaaccaaaacagttttacccactaagttcgtcatttacttgacctaacctttctcaggtaatggaatatcaattacatcaaagtcacgaacgactttcgagtgactaaagactttctgtgcttgtttttgtagttccttactcaacttacccgtgtaccgagccgagatatgggtcaacaatagctgcttaacaccggcctgttgggccacctgggctgcttgggtactcgttgaatggtaatagttatgtgccaacttaccttcatcttttccgaacgtgctctcatgaactaaagcatccgcatcctgtgccaagctgaccgcgtgcggtgtccgccgagtatcaccgagaatcgtcaccgtccgccccttttgtggcgcagcgatgtaatcttgaccattaattgtccgaccatcaggcaacgtcaccgttttgccggcttttaattgaccatagacgggaccactcggaatgttcagggctttgagtcgatcggcttgtaattcacccgggtggtccgcttcttctacccggtaaccaaaacaagcgatccgatgatccagaggttcgcagcttactttgaacgtcgtatcttcaaaaactgtctcagctttcgtgatttcatgaaacttcaatggatatgacaaatgggtgccagagacccgcaacgccgtttgaacgaagtcgcggacaccgactggcccataaatggtgagtggttcgtccccgccttgaaaagaacgcgagctcaataaccccggcaagccaaagatatggtcgccatgcagatgggtaataaatatttttgcaattttgcgtggttttaacgtcgtgcgtaaaatctggtgttgcgtcccttcgccgacatcgaacaaccagacttcatttcgctcatctaatagtcgtaatgctgtgctagtgacattccgaaatttgcccggtgagccggcaccggtacctaaaaattctaattgcatatttttgttcgtcctatctatacagtctgctaactattttaccgaatctagcggcaatacacaattgttagcactgcaaagtcatggccggtcaacaccgtgcgctcaccgaccgcaattctaaaaagcaagcgacgttgggcgactcctcacaattaacaggaagaacacgaacaacgctgctcattttattttaacatgtcaggctaaaattatcgcacttggtttcaagattccacgtgccaagactgcctgccaccggtgttatctataatcaaaaaatgcacttttccgggcaaactgactatgacgggttgtgaccgttttcattcaacccgtcatcgccggcaaatgaatcctcagtccatcttgcttaacccaattgattatcgtatacttgcttacaaatcgtctgaacaagaggtaaccgttatgcgactcatcgactttaacttatcaaccgctgatctacagcaaactttaccactgtattgggaactaacgactaatcaaatctggccaatccaaagtgttacgctcgtcgatcaccagctggttttagtagcttcaaaaagcgcgctcccgctgacactcgaccagttcaatgcgcggacgcgccaaatcgatggtcaaacgcagctctgtattcaaaccccaccgcgcccgcgccgattatttggctatcgcttaagccagcagcgcttactgtttggctgagcatctaatcgcacgtcagctcaaaaacagcgtcgttagttaaaattctaacggcgctgtttttggattgttcattattttatcactagtccacctatcagactgtcgtaacgacaatcatcaactaattatgtcgtcacaaaagtttagtccataaactggaaggagtagtccaagatttgaatcgtatcatcattcttggcaccagctgcacgtaaggcatcatcaacacccatcccacgtaattgtcgagcaaagcgcattaaactttcttcatgatctaaattggtcatcttaaagagccgttctagcttatcaccagacaagacgaacaagcccggttctggattatcaatgctaaagtctgcatccgcttcagtcgtgtaatcacggtgcttcaagtcgtcaacacccttgattgggaattgtggcgtcgtatccaataaatcagccgtcttggctaacaaggcttttagtccctgttgtgtaatcgacgataccggatagacggctggcgtgtttggcaacgtatcatccgtcgctaacttcgccttaaagtcttccagattagcttcggcatccggcatatccatcttagtcgccaccacgatttggggccgcttcaagaggtcaggatcataactcgtcagctcgtgattaattttgtgataatcctcaaacggatcgttttcttctacaccactcatatcaatcagatgtaaaataacgcgcgtccgttcaatatgccgcaagaattgaatccctaagccgaccccgttagccgcaccttcaatcaaaccaggtaaatcagccatgacaaagtcacgaccgtcatccaaacgaaccatcccgagattaggcactaaagttgtgaagtgataggccgcaatcttgggcttagcactcgtgaccactgaaagcagtgtcgacttgccaactgaaggaaaaccaaccagaccaacatcggccaagactttcaattccattcgaatcgttaattcatcgccgggctcaccattttcagcaatttcaggagcagggttcttagcgctagcaaaatgaatatttccccgaccgccccggccacccttggcaaccactaaccgctgatctttattgacgatatcgccaattaactcaccagtttcagcatccgtcaccgttgtcccaagtggtactttgataattgtgtccttcgcggaacgacctgtcatctgcttaatcattccattgccaccagctgcggctttgaacttccgcgtataacgaaaatccatcagtgtccgtaatccttcgtcagcctgcaatacgacgcttccgccgcgaccaccatcaccgccagcgggaccaccattgggaacaaacttttcacggcggaaagcaaccatgccgttaccaccgttaccggcctttacatctacttttacttgatcaacaaacatgttcttttctcccgtttcttctatattattatctacgaaatccgatcgtgcgaaattagatacctgacctagtatacaaatcttcggccacttcgtcaaaagttccacgcctaattagacagatcatctttatttggatgctaatgacgatttgatgacagattttggattattttgacggtttttgaaggtttttgttgcattttgacgtttaaacaggtatattattatgcggagggatttgaaagtgcttacagaagaacgtcaacagtacattttaaatacgatccgtttcaagggcattattaaaatcaaggacatctgttctgaaactcgttgttccgagtccacggcgcgccgtgacctccaacagctagaagaacagggcgagttactccgcgtgcacggtggtgcgaagtatatgaactcactccaagaggaacccgcgatgaatgataaggtttcccgtaacgttaacgccaaggaccatatcgcgcagcaagccgttgcgaacattcaagttgatgacgtcatttatttggatgctgggacttcaaccctagccatgattcaccatttaaatccgagctacaacttacgtgtcgtgactaatggtgttgtccatgcttccgctttggcagacatgggcatccaaacctacctgcttggtggcaatttgaaaggcaccaccaaagccgtgattggtcccgaagccgttaaatcgttagaggaataccgattcaacaaagtttttcttggtatcaacggtgtccacccaaaattcgggctcacaacgcccgaccccgatgaagcggtcgtcaaaaaaaccgcaattctacaaagtgaagaaagctttatcttagctgacaacactaagttcgaccacgtttcgtttgcgcgcgtcggtgatttatccagtgcaaccatcatcactgaccaactcacgccaagcgttgccgaacagtatcaaccattaactacgattcaggaggttcaatcatgatttataccattactgtcaatccatcaattgactacgtggtgcaactaccccaaatgaccctcggtagtgttaaccggttagcacacacggcgaaactccctggcggtaaaggcatcaatgtatcgcagattctgaacgacctagaccaacccaacaaggccctcggctttatcggtgggtttaccggcacgtttatcagtgatgctttaaaagccaagggcctagattgtcacttcacaccgattgccgatgacacccggatcaacgtgaagattcacgctgaagaagagaccgaattaaacggtgctggcccggacatcaccgccaaagaaacagaagccttctacaccgaattggccaatttaacgccgaatgacgtggtcgtcatgtctggtagtttagcgcctagtttaccagatagcttctactacgatattattcagaaggtcgaagctgctggtgctaactttgtcatcgacacgaccggtgaagctttgaagaaaactttacccagccaccccctcgttgtgaagcctaataaccacgaacttgctgattactaccacacgacgtttaatagccaggctgatatcattgcagcgggccaacggatgctagctgaaggtgcacaacacgtgctgatttcaatggccggcgatggtggcctcctaatcaccaaggatgcggtctactttagtcccgcaccaaagggccaggtaatcaactcagttggtgccggtgattcaatgattggtggctttgtcggcacgttcgccaaaacacacgatgctgttgaaagcttccgctacggcttagcttgtggctccgcaaccgccttctcagaagacattgcgacccgcgccaagatcgatgaaattttgccactcattaacattgaaaaactcgctcactaaagaaaggactgttaactaaacatggatatccgcgatttattactaaaagatgtcatgatcatggacatgcacgccacgaccaaggacgaagcgattgatgagttagttcataaatatgccgaacaaggtatcatcaatgatgaggccctctacaagcaagacatcatcaaacgggaagccgaatcaactaccgggattggcgacgggattgctatgccccatgccaaagataaggctgttaaccgggcaaccgtgatgtttgctaagagtaaggccggcgttgacttcaacgcgttagatggtcaacccgttcatcttttcttcatgattgctgctcctgaaggtgccaacaacacccatttagccgccctcgccgccctctcaagcttattgattgatcctgaattggtcgctaaacttaagaatgcacagtcacctgaagaagttcaacaactcttcggtgatgcccaggctgctaaggaagaaaaggaagccaaagatgcagctgccaaggccgaaaaagaagccgcagctgccagcaccaccactgacgaaaaacgtccctatttagttggggttaccgcctgtccaaacggaatcgcccatacttacatggccgaagcagccttgatcaaagccggtgaagcggccggtgttgacatcaaaatcgaaacgaatggttctgaaggtgttaagcacttattgactgccgatgaaatcgctcgtgccgacggtgttgtgatcgccgctgacaaaaaggtcaagatggcccgttttgatggtaagcacctggttaaccgtcccgttactgacgggatcaacaaggccgatcaattagttcaagaagccttgagcggtaaagctcctgtctatcacgatgctgatggtggtgctgcagatgacgatgaaggtggcagcgctaatggtagtgtttggggtgaagtttacaaagacctcatgaacggaatttcccacatgttgccattcgttgtcggtggtgggatcttaatggccctctccttcattattgagcaattcgttggtagtaagagcttagcctttaccttcttcaaccaagctggtaacatggctttcgccttcatggtacctgttttagccggttacatcgccgaatcaattggtgatcgtcctgctttgatgcccgggttcgttggtgggttcatggccacggtatacactggcgcttacggtggtgtttacacggcctccattaccgccaatgctaagagtcccgctggtttcttaggtggtttagccgctggtttcttagccggttatattactgtttggatgaagaagtggaccaagaacatgccacaatccttagacgggatgaagccaatgctgatcttcccaattctgggcttattgattattgctgcgctaatgttcttcgttgttaacccaatcttctcagttatcaacgcctggattacccacttcctaaactcaatgggtactggtaatgccgttctcctcgggcttgtcctcggtggtatgatgtcgatcgatatgggtggtcctttcaacaaggccgcttacgtcttcgcaactggtgcctttaccgcaactggacatgggaacttaatggccgctgttatggctggtgggatggttccaccattggcaactgcgattgccactgccttctggccaaagaaatttacggatgacgaacgtaaagctggtatctctaactggttacttggtatttccttcattactgaaggtgccattccattcgccacagctgaccccttgcacgttatcggttcaagtgtgattggtgctgccatcgccggtggcttaactcaactttggggcgttgccgtccctgctcctcatggtggcctctgggtctcattactcgccacgaatatctggggctacatcggtgccacaattatcggtgccgttatcgctggggttatccttggtctctggaaaccagctaaagcttctaaataatgtgatatctaaaaagacgatcaaattgatcgtctttttttgttttcaaaattaacgaatcagccgtctaaccccgcaataaaacgggtataatgaaagtaatatactgattatgttaacgagaatcgagacgagtttgatgaaactacgaaaatctatctttggcatcagctgtgtattattcggcatgatgctgctttccggttgccaaaaacaaactaaaatgaccctgccccctgtcagtcacaagaccttaacagcgatggtgatcagtgatgaccatgtcattgcgcccaggctgcatgataatggtaaggctttcacgcagtacgcggctaacgatgccggtgcggatttaaaatacagcgcgacgatttttcgcgcttttattgctaaggcgttaatcaccaagcctgacgttgtgctcatcagtggcgatattactaacaacggtgaaaaagccagtcacgagtacgttgccaagcagcttcgccgactgactgctaagcacatccgcgtctacgtcgtccccggtaatcacgacttgaacaaccccatcgcccgtcgcttcaaaggaaagcatcaatatagcaccgaggcgactagcccgacccagttcaagaagatctatcatcaggccggctacggccaagccagtgaaactgacccaagctcattgggatatttggtaaaacctagtaaacacacttggtttttaatgctaaactccgccatttataaaagtaattatcaacaaggtaattcaacggtcggtggtggcctgaccgatgggaccttacaatggcttactaaagtcggtaagcaagcaaaacaagcccatgcgactctcattcccgtcctacatcacaatacaatggaccacacggtgattcatcaggactatacaatcggttatgccgaagatgtccgtaaggcctttaccactgcgggtatcaagttatcgctcagcggccatattcatgctcaaaatatcaagtctaccaaaatcaagaaccagtcactgactgatattgccagtggcgccctgatactgggatctcactattacggtacgcttaagatcaaccagagtaacgggacggccacgtaccacgcgaccccgttaaacgtgagtgcttacatcaagcaccaccgtggtaataaagcgatgcgcgcctatcaaaagtacgatcatgacgtgttatatgcggctggctataacgcagcactgagtcagttatatgaggaccgtgacgaaacgcaactatcaagcgctaaagttaatcagctagcccgcggcatggcggccgccaatatcgcgctctttcggggcaccccagtcaaaaatagcgccgctattcaagcttggcaacaaatgccccacaatacaagtttgcgcggcttcgtgttagccaccaagaaactacacggcaacgtgacgtggtctgggtccgtacaataaccactttataaactaaaggcgacagcgaattttcaggctgtcgtctttttgattagtcactacttatagctggtcagtcacaccggcaccaccctacttcgattcggctagattggttttcgcacacgtagcatttggttaacaatggtcattaaataatcacgcttgctaaatccgacgacggccgttatcaaaatcaatagataacggagtataacactgtgatagcctcctaaaaatagaaagccaaccgccaaaaaagtgagcgtaatcagccccagtatcttgcgatcatatggaagcgtgccaagtttttcgcgacagattcgattcataaaccaataatgaacaaccgcatacatcacatagcaaattaatgttgtatatcccgccacctcgtatcctaaaattggaatcaaccaataatttagcgccacattcaatactgcgccaataacactggcaatcatgattaaagatgtccgttcataatagaactcaaactttgcaaataaatcaaaagcaaaaatgaaaaagacgctcattgcgattggtggaacgatccaggtcgccttagcatacgctcgtggtgcgaatatcgaaacgatttcgggcgcaaatgcaatcaatagcaggttgacaaccgcaattaaaactaaggcaccgtaagcgacacccgcaatatcggccacccgtcgatccttgattttttgatatatccacggactcagcgtttgcgacaatgcaacgttaaataaaatcatgatttgtgaaagtgagtacgccaaactataaatgcccgcacttttcgtatttaccatgttcgcaatcataatccggtcagcactactcagaacgatttgtgaaagataatgtggggccaacgggatgttgaacattaatgcgtgacgccaaaaatagcgcgagaaaaacgttttgccacgatacatttgcacaaaaaacaagcccgtatagcctaccagttccactaatgctagccctaaaaatcgagccgtcactttatcattcgcatacacaacgagcaatacgcctactaacggtttggcgattgcaaccagcaaggtcaccatcaccaatgatttgtattgcaaggcaactcggcgctcaccagcctaaaaattaaaaactgacgaggtccataccattagaagcatcgccaacatctgcgtcgtcgttaaagaaaagacactattccaaaaatcacgaaagccaagataaactagtgtccatgctaataccaacacaaccgttaatccttgtaattcagccgaatatcgacgtcgatcatggctgaatttgatgagaccttgagtataaacgccgtagcacagatttagtgagacgatgatcgtgacgatagtcagccaggagtacagcacattaaattgaccatactcggaagtagacattattctggtaaaaatgggcgttgcgattattgaaatgctcttttcaaaaaaagcacagattaagaaccaaagtgaggccttaacttgctttggcaaatgccgatatttatttctaatactgactaacataaattcctttctcatagatctgaactgagcatcacatcccgtgcttactaataacaaatctcataagcaccgcacacgttcaatcacttggttgttgtcgataccggcgcccatttaccgaccaaatcgttcttaaacgtaaatagttgatcacatagtaacaattatctggggatgtcaccattgcgcggactaacgcagccagggcctgaccaagttttcgtttgcgcatactggccatcgccatcgtaaaatatttttgcccacgattaaacgtactttgggcacggacgtcatttattttgtctgttaacgccgacatcccgcggccgaaactgtctgctcccgtccgtttacgttccgcatacaattgttgaatatagcgcgataccagatacgttttccacgcgtcgctggtcatactattaccgcgtaaccgatagttcaacactcggcggttaattgacccgattttgaatccattagcaagcagccgcagccagagatcatagtcctcagccgttggtaataaacggtaaccaccgacttgttggacggccgttttccgcattaaaacggtgggatgaataattgtcgaaccatagggcaggattttttgaattagtggttcagcctcgggaatggccgatttttcaccgacaacctcatcctgctcatcaagataagcaatatttccagaaattaaatccaaatcgcgcgtttttagcgcctctaattccacttcgagccgattagtgacagaaatatcatccgcatccatccgcgcaatcaactcattacttgctagctcaatcgccttattgagactagcggccaggccgaggttttctggattgcacactagtttgatcatttccacacggcaatcgtaatccattaacaagtcttttaaatcactccgttctggattatcaagtacgatcacaaactccctcggcaaataggtttgcttcaaaatcgattcaaccgcttgctggacttgctcaggtcgttcattatatacactcataattacgctgattgccattttttctcctcaatcttcaattcagttgaaagtaaataccccaagaatattattgccgtcagtaccatgccgctgcgcgcaacctcacctttataatttgcgattagtagaactacgccaaaggctagaaagattttactatcacgaacaacctttccagactttttgtggcaagccgtcaacgaggctataatcgtaccgtacagtagcgccatgtaaatgatgccccccataaataagtcattaataaagccaatgtcggacgttccgaaccaaatattgctggcattgccaccatatacgcgaacgccataaccaaacacccagtctaaaagctgactcggaaacatcaagaacgagcccgtcagttgttcgtaattgccctgcttactaccttcaaagacgagtgcaaacgtatcttcgaagccactgacgatccaggtatacgtatcaggttggatggattgcaaaaacgctaaacccaatatgataaaggtcacactcaatatgataatcaacacaacttgaaacagccctcgaacactggacagcattcgtttgaccagcatcaaggcaaaaccaaaagccagcgtgatcaagccagttcggccgtttaatacgataataaagacacaaaatggcaggaaccaataatactttttgccaaggttcattcccatatatatcgcaactagtcccatcagactatggtagattggtgtaaaaaatgtgtagtcactgctgattccatacaaacgttcaccataaataaactgattctgaataataccggtggctgtttttgctaaaatcgcagcgcgaatacccgaacttgccagcatgaccaaagcaaacaagcattgaacaaccaccatccatagcatccaggtcaagaccgtttcacttgtcacgttaaaatacttacgaagaacttctagccataacactaaggcaaggacattcaaaataatcacaacattttgaaacacccggggatcagttcctgccagcttcgctctgaacgcaaagtaaatcactgatagcatcacaccaatcacaaaaatgtgcagccgattaatagcaatcgataagtcctttggcgacaatagcaagacgcaaccaccagtaatccccagtgtaacaatcaggggcacataactactgctccaaaagttgggttggtaaatcaggtaaaatccggcaatcaatagtcctagtcttaagaatggcccaccaatctgacgatttactgcagtcatcgttccattactcctttataaacttgctggatccgctgaatgaattgcctttgttcatagtcactaaaatcgaccgctgctattttagccttggtttcctgataaaatttcccatccgaaaagagacgtgtcagtactgccaataattcagcatcactcgcataaaccaggccatttacccttgcggccgtttgagagatgcccccaatgcgggggcaaacggaatcgcacccaataaggctgcctcgaccatggtcaatccaaacgcgtctgatttggacgtcgacagcacaacttttgcatgccgcatgtatttgtaagggttacttttaaaccctaaccaccgtatttgcggggtggctgcaatctgtttagcgatgtgtgcgctcaagctaccatcgccgacaatcccaatctttagttcagggattgcgtctaataatttatgcgcaattctcacaaatcttgcgggatctttaacatcttccaaccgtcccacgaataacaggtcaaatgcagtggttgtactggcagtagccagttggcaaatccgtgaactgtcgattccattgggaataatcgccgtattggttaaatgtttgtggaagcgatacgattctttagcccaatctgaaacatataagactcgtaagctcttgttgccaatatattgaaacgccaaacttttccagttcacactagtctgccatatcggggcttgatggatatgggtgataattggcacatggtgaaaaagcaggttgaccaaaaaactcgctttgaaatcgtgtgcgtgaataatatctggctggagtgccagaatagctcgccgaaatttaagaagctgtttcggcgaaaaactttgatacgcgattccggcagcttgcaagctttcttgtatcgatcctgattgtgagcagtaggtgaaatcataggatccactcaaacccctactgatattaatgaccacctgctcagcaccacctaatttggcggaaaacaagacatgaacaatttttgtcatcgacaatcgtcccttctaggccaagcaacgcaaatagtacgcctgcgtttgttcgagcatctcatgctcagtatagtgacgttgatacatttgataggaattagtcttgacctcggcgatctttttcgattgatagagtgtcagaattttttcagcaatctggcgcgcatcattggtgaccaaaaagccattatgatcaatcaattcctgaatgcccccaacattcgacgcaataatcggcagaccttgggctaaggcttccactaaactgattgggagtgcttcataatcagaaatcagcaccccaacgtccgattgagaataatatttttgtacattatccaccaccccataaaagttcactttaccatccagattcaactggtgcgttagcgttttacaggcttcaatcgaagggccgtcacccagaaaatgacacacgattggtagattttccggcaagtatgtcaatgcttgaatcaggatatcctgccgttttggtgtatcaaagcgtgccgccattgatagtacaaagacctcggaactggtcgccttgtttgcgcccgttaatgctgtcacgccattatggataacacgagcaggatgagcactagtaatcacaccactttggacacccaaatcataatcaaactgcgagacacagatgtaagccgttgtcaggcgacttaatgctttttcaatagttttccatcaatagctgccgtttcttcccgacaccaggagtaaagccccagccatggaccgtaaaaatgactttcattggcaatctaatcgtggcgagcctcccaatcataccagccttcgaagaatgcaaatgaataatatctggctgccaattttttactaatttccttaacgtgtagattgctttcaaatcactcagcggtgcaatcggatgtaccaggctggcaactctgacaacttgcacgtcttgaaattctttcgcgacgcttgcactcaggcgtccttcaacgccgtatactaaggaaacggcattgccacgcatcacttgcgctttgatcaaactatatagatgcgcctgggccccaccccaagtcgcttgagtaatgatgtaaaaaatcttcactaccgcgcaccatccccggaaataatcaccctaaccgttcccatcagcatcttgatatcaaaccaaatcgaaaagtgctcaatgtaatagttatcgtactgacacttggcacccggtgtaatatcatagccaccattgatctgcgcatagccggtaatgccaggaatgattcgtagccgtttcggaaaatcaggatagcgttcactgaattgttcggttagttctggccgttccgggcgaggtccgaccaaactcatatcgcccttcaaaacattccaaaattgtggtaactcatcgatccgagttttgcgcatccagcgtccaaccggcgtcacccgaggatcatttttttgtgcccagatcgcacccgtctgcgcctcagcgtcctgatacattgatcgcagcttaatcacgtcaaaggtcgtccccatccaaccgactcgcgcctgcttgtagaaaacgggaccgtcagaagtcaacttgataagtatggcaaacacaattacgatgggaacgctgagcagtgtgcccaataagccgactgctagatcgaaacaccgctttagatccatcttccagccggtgaccggaacaccaattttgctaataaattcacagtgttgttcgtcagccacgattgattcattaatctcaacttcgtgcatgctcacattccccttcccagtacttggttaatcctcttctcaacggccactctgattcataatttaagcgtgccaacttgccaatacttgcaactgaatgatcaacttcaccaccccgctgctcggcccgtttgatttcaagttgttgaccagcaatctcttgatacatctgaataatgccatttaaacgtttctaagccattggcaatattgatcacttcatgttgcacttgatgttctgtaatcaaccataatgccttgataacatcacttacatatacaaaatcacgggtctgcgttccatcaccgaataatgtaaatggtcgctgtgttttcaaacaatccgtcaaaatcgacaaaacccccgaatacggtgagcttggattctgacgcggtccataaacgttgaagaaccgcacacaaacggtcggcaaatcgtacaactcaccgtatgccaatacaaaacgttcagtcgcatacttatcaatagcatacggtgacacgggtgcgacgcgcgaatcctcgcgttttggtaattcaggtagattgccataaaccgccgccgaagaagtgaatagaaattgcttaataggcaagcgaatttggcgaatatgttcgagcaagttaaataccgcggtatgattgacagcatgcgtttctgccggccgctcaatcgaatccgccacacttgcaatcgctgccagaaaataaatatagtctggccgttcgtctgctaacaattgttgcatgaatttatcgtcacagacatccgcgacgtatatcgtaatctgttcccaatgcttgatattgctgatggcccccattgacagatcgtctaccaccacctcaaagccagattcaactaaatgatcaaccaagtgcgagccaatgaaccccgcacctcccgttaccaatgccttcataactatttacccctctcaaaaaagccaaaattttcgtcgttgatttggtcgcaagacttcccctaacactactggatccccgttcagtagcagtcttgcattcactgcaaaagatgcaggattggtactatctaaccgtgctaatgcctgataacctgcccgcatcataaatcctcgtcgtgccatcaaatgcgcatctgaagcaatcacttggaccagcccgcattcaactaattccagcgctgtacttttaaccgctcgcccaaattgcccaacgagactccccgctgttagctgtgccaaacagccctgctgcactaaatcatagagccgctctggttgtgccataatctgagcatttcgctctggatgggcaatcaccggagtcgtcccttgctgtaagagctcaaagattacttgcgccacgtaattaggtacctgctcgtgtggcaactctagtaacaaatagcgccgaccaacatcaattcctagcaagtgcggcagagctgtcgccaaatcatctcgcaaatggacctcctgaccggcaaaaacggtcagtggaatttgttgccgcttaagttcggcctggagctcggcaacggcacgctcgactaccaggccggtattctgataacgccgatctagatgatgtggcgttgccaagacgtaatgaatgccatcagccaccgcttgtcgcgccatttcgactgcctgagcaagctgctgggggccgtcatccaatcccggtaataagtgacagtgcaggtcaatatactcagttggtctcagtcccataatagccgtacccataaccgtgagttttaatgtccacgtcatttaaaatagtcccgagtaattgtgcgcgagcattcttcaaggcactcactgcctggcgcaccgcaactttttcgacaaagttttggcgaacgactaggacagtgccatccacttgaccagctaaaatccgagcgtcggtcacgggcagtatcggcggcgcatcaacaatcactaaatctaacttacgtgttgcgaccgttaaaaacttggtcattctatcgctggctaataactcagctggattgggtggtttaggtccactcggcatgacaaacaaatgatcaagtacgggataaatggcttcgttcacgtccgtcagttgcccgcttaaccatgaactcactccccgttggttactgatcgcaaacgtctgatgaatcgtcggccgccgcaaatcagcatcgacaagtaagacttgcaggcctttcttggcgtattccacggctaagttgctgccgaccgttgattttccctcgccctgaatcgctgacgtgatcattagtgttttcaacggtttaccgaccatcgcatagttaagatttgttcggatcgttttgacttgctcagttacgactgacatcggtgccgtcaaagttgttaactgtatgccggtatgcatattcgctactcttcgcctcaatttcataaccgttcccccctatgttaaactcgtttgactgccgctttaacaactgacgtcaccggctgtggtttaatcgccggttggtcgtgagtcgctgtgaccggctgctgatgattaatgattcctagacttgtcagcattaattcatctgctaggtattcgagtgtctgcacccgccgattggacaagattcggacacttgcatacaccaatcccaaaatcagccccccccccccacgaaaccaattaggatattgatgatttttttaggcgctaccggctgatccggcgtctctgcgggtgcaacgatcgttacattattgaccctaataatatgctggacctgatctttaaacgttgcagcaatttggttcgcaatcattgcactagctttcgcatttttatcacgaacaacgattgaaaacacctgcgaattggccgtactggtcacgctgaccgtttgcttaagcgactcaagtgagcgtcgaatgtcagtttctgccattaaagtctgccgtgccggcttcaacacgactggttttgtaattaattccttataagtcgtaatcatctgcacatcggcttgctggcccgtcaaatccgcgcccgcactactgtgtttgcggttcactaatatttgaacattggcttgatactcgggctgaatgacccacaaagtcaccactgttgcaatcgtcccgcccaaaatcattaaactcaataataccttccaatactgacgaatgagtttaacaataaaatcaaaggttattacttgctccattccacacgctccaatatttcttgactgacttttattaaacgattgacattattgtagaaaaccagttgcaaacgacgcaatagttttcacgaattttcatgaaactcatataaatacaagcgaatattcgacaatctctaaatttaaattgacattatagacaataatgttatatttattgatagttactgatcaaaataatataaatcgtataattatttgactttattttagctcgtatttacccacaattatttcgattaaatcatcggttactccagcaaccaatgtgcttttcaactaatcacaaaatcgacatttttacaaatcaatgatgttttcaagcatcaaaaaagaccacctagttcgtgaaaactagatggtcttcttaacattaattacattagttagccagatgacaactatgtggcgcccttttgataatgcttcggtgttacaccaccaccggctaatgaaaatttgacagtttgtgcaacgtttttagcaattcccagggactgaatctcttccagtgaggcaccagcaattttactcatcgatccaaatttacgcaacaacttattacgcgtcttcggcccaaccccggggatctcgtccaagcgcgaactcaatgaatgtttggtatggacttgtcggtgaaacgtaatcgcaaagcggtgcacttcatcttgaatccgttgtaataaataaaatccttgactcttcggatctagatgcaaatgctgatcaccagcagaagcgagtaggtccgccgtcttatgatggtcatttttgaccattgccgcgactggcgttgcaatccctaattcgttctctaagacgtccttagcggcttccagctggatctcgccaccatccatcaaaatcaggtcgggcaatgctgcatgctccttcagtagccgtgtatagcgccgccgaatcacttcacgggtcgatgcagcttcatcagcatgatcgaccgtccgcaacttatatttccgatacaattttttattcggttgcccgtccgtgaagacgaccatggcagaaaccaagtcggccccctgaatatgagagtggtcaaaagcctcaattttatgaccagcaggaatgcctaaagcatccgtgatttcttgcatcgcccccgtcgtcttgcgctcatccaattccaacaaccggaacttctcttctaagacgattcgagcatttttttgtgccatgtccagcaaatcctttttctggccgcgttgaggggtccttaccggaattccgagaatgtcactcaggacctgcttatcaagaccgttggggactaaaacttcgcgtggtagaacgttatttttgcgattataaaattgcaagataaagctcgtcatttcttcaggtgcagttgacactactgggaacaagcgtttctcgcgcttcatcaaccgcgcttgccgaataaagaagacctgaatcgaaagccagcctttatcaagatagaaattaaacaggtcgcggggcgtattatcgtttgaaataattttctgcttttcaaccgtcatttcaatataattcagttgatcacgtaattcagcggctcgttcaaattctaggtcagcggccgcttgatccattcgtttagttaactgcttcttgaccgtttcaacgtgaccattcaaaaaggatttaatccgcttgatctgagcgtcatattctgccaccggcaccgttttaaagcaagctcccaagcattggcccatatgataatagagacacggccgcttctggaaaccatggcaacgccgcaacggatagaccttctgaataaaattgaccgtttcctgagccgcgtaaacattgggatatggcccaaagtagtagccaccatctttacgaacatcactgacgatcaggatctgggggtctcgttcattggtaatcttaatgtacggataaccggttcccttttttaatttaatattaaagtacggttgatgtttttgaattaacgtaatttctagcaggaaggcttccttatccgttgaggtcacaataaactcaaagtccgcaatctctgatactaaccgcgcggtcttaccagtatggctgcttttgaaatatgaacgcacccgatttttcaagttcttggccttacccacataaatgatctgactgtttaagttcttcatcagataacatcctggtaagtccggtaacaaggataacttatgttcaatatgcgcggatgccataacacaccttcccttcatttagattagcattattagtataccgcctgctagcatggggctcaaccaaacagcccggaaatatgatttttattatgaccgactattcatcactgtcgctactgatcacagtgtagcaaaaaaccggtaatcagcaactgagctgattaccggttatgtgttgtttacatcaaaattttagaaagaaaatcttgggcccgctctgtttgcgggttcgcaaagaattcctcaggcgtattattctcctgaatatagccatcagccatgaaccagattcgatccgctactgacttagcaaaacccatttcgtgagtgaccacaaccatggtcatcccatccttagcaagttcttgcatcacgtttaacacttccccaaccatttccgggtccaaggcagacgttggttcgtcaaacagcatcacttcagggttcatcgccaacgcacgagcaatcgccacccgttgagcctgaccacctgaaagactacttggaaaggcatccgcatgatcgtccaacccaacgcgttgcaataattcgtgcgcttgcttagtcgccgcggcatcatcgacatgcttgaccttcatcggcgccaatttaatgttttccaatacagtcatgttgggaaatagattaaacccttggaaaaccattcccattttttcacgtagcgcgttaacactcttcgtatccaaagttgtgagatcttgaccttcgaaagcgacttgaccacttgtgggcgtctcgagtaagtttaaacaacgtaagaaggtactcttcccaccaccagaaggaccaatcaccacgatcacctgaccgggttcaactttttctgtaatatcctttaaaacgtcattttcaccgaagctcttcgcaaggtctttaacttcaattactggtttagtcatgttgcattctcctttcgaagtagttcaagatccgtgaagcggtaaaggttaagatgaagtatagcaccataataacaacgatcggtgcaaccccccggtacgtatctgaacgaacaatgttactttgataaattaattcagtgaccccaataatcgaaacgatggaactatccttgatcaacgtaataaattcgttcccaagtgatggccaaatgttcttcaatgcttgtggcaagaccacgtaacgcatcgtttcaccgttggacattcctaaactccgagcagcttccgtctgcccaacatcgacggaattaatcccgccacgaatatattcagcaacgtacgcaccagagttcaaggaaatcgcaataatcccagaagtcagtgctggtaaattgacgaataacccaagtccgaagtacacaaacatcacttggaccatcattggcgtcccacgaataaattcaacatacgcagttgctaaccaccgaatggcagtcttaagtggatttcctttagccatccgtgctaatgccaataaaataccgatgataaaaccgaagaaaacggagcaaaccgtaatgattaacgtatattcgatcccggttgcaaaagccttccagtaatgtcccattgacgtattaacggtattggtcttcaaatacttgccggctgccggtaagtattgctttttaacgaggttctgtttcttaatccgatcaacggtcttattgactttgttaacaagactagttgaacctttccgaaatgcgatcgccgaactcgttgcactagagctcatgttgaagtcactaggaatagcaaccaaactcttattgtttgcaacataggcttctgcagaaggcttttccatagcaaccccatcaactttgtgactctgaagtgccaaaatcagatcagattgtgaagtcatccctttagccttggcagtcgtttggtttttgacggcattatattgagtcgttccagtttgggcacccaacgtgccattcttgaatgaattcttattcttgtacttgcccttatcagtcttattgatgacaatatcgtagccaccttgataataaacgtgggtaaaatcaacatttttccgccgtgaaggggttgggttcatcccagagataatcatatcaaccttgccagtttggagtgccactagcaatgagtcaaatgacatggatttgatcttcagcttcacgcccagatccttagcaacttgtttcccaatctgaacatccatcccaacgatcttactcttaccgttgaccgttgcttgaaactcatacggtggataatcaggcgacgtccccattactaagacgccctttttctgaatttgttctaatgaattatcggccgcttgcgcatgttgcgtctgtccgagtgggacgacggtcatgatcagggccacaataatggctaaaaaccacccaaatctttttttcataggtattctcctcgttttgtaatttacaagaataaagtataaccgcatatgattatttatgcaagtatttttgagaatttctttattttatgcataaacaagtcgtttatacacgttttgacccattgattatgcataaaagacgaataactgacaaattgtcggaaatttgctatgataggcgttaatcgaaaggaatgattttatgagtttaaaagtacagcgtcaagataaccttgataagctattcgacaagtttgccattggtcctgacgataaggataaactcaccactaaagcggttcaggatactattgacgaacatgctaaacgcaaagaaaataaggcagctgataaaaaggacgcccataaatagcagtcaaaaaaaacgcaatggcagttagccatcgcgtttttatttgaataactatttagcaaattttagtcccgattgtttgcatcttttcgcgccgctctgcttccgtttctggtgaaacatcgcgccaatcaacaacagccaaagcaccgtcgagcatcccgctatcatccttgagcgctaaagcattatgccagcgagaaatgttgaggccgttccccaagtaggcttcatcagccggtgcaacgtgcatcacataaccagcattattttctaatggcgtggtatagtcgggatcagcggctttaagaataactaactgaaacttattaccaatggcacagctaccgcctaaactcgaatatttgttagaaccatcgtcagttgttaaaattacttgactccctgccggaatcttatctgcaaggtaggcttgagcatcgtctttgatattaatcttcatagttaagcatcctttccgtttcaaaaacatttaagttgtgcacaactcttttacagtctttaatttacgctatttcagctgcaaatgcaattaatttacctagaaaagtgaaaataaacagccgaactcaataatgacacaatctttgcaaatgatatgtggtcgtccgtcgcaataaaaaagagttgggctgccagccttacctgctgacagcccaactcttcaggttagaccactcttcaccgactatttaactggtttaccattcgggtacttatcgttgagtttaacaatattttgttgcgcaacttcttcgaacggaatatccgcccattcagcaacttgtgataagtaccataacacatcgcccatctgtttcgtcagctgatctttattcaaacgttcaccatgaaacgtatactttttgactaagtcaacgacttgaccagtctctgaagctaatcccagcgataagttcgtcagcacctgctcattaccatataatgtccgatttgctaacgactgatactcattaaattccaagttagttgcctcccacagtgtgcgcttcgatccattgccaaacagcatccttgccttctttggtcttagctgaaaaggcgataaaatcgtcttcagcttggaagttaagcgtctttttaattaaactttcctgtttgttccacttaccacgcggaattttatcactcttagttgccacgaccagtaatggcatctcatagtaacgcatccactcgtacattacgacatcgtctttagttggcgcatgacgtgcatcgactagaataacgacacctcgcagtgtctctcggcttgttagatacgtctcaatcatttgtccccacttctcacgttccttcttagataccttagcataaccgtatcccggaacatcgacgaagtataattgatcttcaactttataaaagttcagtgtttgggtcttcccaggttgactagacgtccgcgcatagctattgcggttaatcaacacattaatcagggatgattttccgacgttagagcgccccgctaacccaatttctggaaacccagtagtcgggtactggctcggcgctaccgcgctcatgacaagttcaacgttatgcacttccatcgaattaactccttctgcaatcgtattgcattcattttaccataatttttgcagcgggttgtcatccgcgctcaaattcgatttaaacagcactcaggaccgcgaatgaaaactcatcgcggtcctgagtaatgtctattgatcttctgaacgaaacgttaggaagctttttgatcagctaaaaccagttctggttcagcgtgatcagcaaccgtctcgcgagtaataatcacctttttaacatcttcacgacttggaatatcatacataatgtcccgcatcgtgtcttcaataatcgagcgtagaccccgagcaccagtattacgtgctaaggcttcttgcgcgatggcacgtaaagcgtcatcgttaaagtctaattctgcaccgtctagagcaattaggcgttgatattgcttgacaagcgcattctttggttccgttaagatccggaccaaatcatcttccgttaaacgttctagcgcagtcaagattggaaggcgcccaataaattcaggaattaaaccgaattgtaagaggtcttctggcacaacttgttgcatgagactcttggaatcgtctagaacggcattcttaccatcggtgtccgtaccgaaaccaatcgttttatcgcctaggcgacgtttgacgatgtcttcgattccatcaaaggccccaccaacgatgaataaaatgttggtcgtgtcaatttgaataaactcttgttggggatgcttacgcccgccctgcggtggcacattggcaatcgtaccttccaaaatcttcaagagggcttgttgaaccccttcaccggaaacatcccgtgtaattgagacattttcactcttcttggcgatcttatcgatttcatcaatataaatgatccctttttcggcacgttcaacgtcgtaatccgcattttgcagtaatttcagcaaaatattttcaacgtcttcaccaacatagccggcttcggttaacgtcgtggcatccgcaatagcaaatggcacatccaaaattcgcgctaaactctgagctaagaaagtcttaccagaaccagttggtcccactaagctaatattactcttttgtaattcaggaccatcttcggtctcttcatcattatcagccatggccttaacccgcttgtagtggttataaaccgcaactgatagggtccgcttagcttcattttggccgatcacgtattggtctaactcgtctacaatttcctttggcgttgggatatctgttaattcatgggtttgttcttcgctaaactcttcatcgataatttctttacataaatcgatacattcattacagatataaacgccggggccagccacgatctttttaacttgatcttgtgatttaccacaaaatgagcagttcacagggccgtttgtctcggtattttcaaacattcattctcacctcatcgatgtatttacatggattaatcataacagaaaaactgagctaaaaccagcttaggcactgtcttctacgtccactactataacatggacgaacctaaacccgaaattatctgttcaatcatccggctaaccactttgaaaaccgaatgattctcgcagtaaatcacaggcgtcagccaaatagctattaaattaatcttacgattagctgacgctatgtaaaagggtctcggaagaattattcttccaagaccctcgacttgtatctaattgaattaattagttcttgtcgctgtcgtcttttttgtcttctgctttggcattttgcttagcagaatccgcaatcaagtcaacggcttggcgaatcgcaatgtcatgtgacaacatgtcatccgttaaagcaccacgaacagcactttcttccatgttgtattgactagctaaatccttaacttcggccgcaatttcatcctgagatggcttgatgttttcagcttcaacaaccgcttctaagaccaagttagtcttaacccggcgttcagcatcagcagcaaattgcttgtgcaagtcgtcttcagtagtaccagtcaacttgtagtaagtctttggatcgataccttgttgttgcatattagccaagtattgatccatttgacgatgaatatcgtcttctttcatggcatcaggaattgcttgaatttcagcattgtcaaccgcttggtttaaagcttcgtcttcaattgcatcatgcgcagcggattccttttgttccttaagttcgtccttgatcttagcttttaattcttcaagtgtgtcaacatcttcgtcaacatccttggcaaattcgtcatctaattcagggagttccttagtcttgacttcatgaactgtcactttgaaagtggcttctttgtcttgtaagtcttcagcttggtaatccttagggaacgttaccttaacttcagtttcgtcgccagccttgacaccaactaattggtcttcaaaaccagggatgaatgagttagaacctaattcaagtgagtagttttctgattcgccaccttcaaatggttcgccatcaacgaatcctttgaaatcaataaccaccgtatcgcccttagcggctggttggtcttccttcagaactaattcagcttgtttttcacgccgtgattctaattcggcatcaacatccttagcataaacgcgagtattttgacgcgttacactaagttccttgtattgaccaagcttaacttctggtttaaccgttacaacggcctttaatacccaaggcttacctttttccatgctatcaacatcgatttgaggttgatcaactggttcgatttcagtttccttgattgcttcttcatatgcctctgggagcacgatgtttaaagcatcttgataaagtgcttcttcaccatacatttgattgaagatttgacgtggaaccttacccttacggaaaccaggaacatttaagttctttttagtccgttggaaggccttgtcgataccttcactaattttatcagcaccaatttcgaatgttaattcgccttggttgccttctttcttttcccactttgcagccattgtattccctccgaaacattataatttctacaattctagtcaattgcatacttgttaagtttaacctatcgacaccgtaaagtaaaccaaattggctaaaaaagcgcgtaagctcgcgatttattgttcgtttttcttaaaaaaagcgacttggaagaagacttccaagtcgcttagatcaatcaatgaaaatcagttagagattagtcatcaatttctgaaacaacaccggcaccgacagtatgaccaccttcacgaaccgtgaacttggtacccttttcgatggcagctggttgaatcaattcaacagtgaacgttacgttgtcaccaggcataaccatttcaacgccgtctggcaattcaataacaccagtgatatcagtggtgtggaagtagaattgtggacgatagtttgagaagaatggcgtatgacggccaccttcttctttgctcaagatataaacttcacccttgaacttcttgtgagtttggatcgaacctggcttagccaaaacttggccacgaacaacttgttcacggttaacaccacgtaataacgcaccaacgttatccccggcttcacctaagtcaagtgtcttacgaaacatttcaagacccgtaacagttgacttaagaacatcttcgtgtaaaccaacgatttcaacttcgtcgccgaccttaacagtcccacgatcgatacgaccagaagcaacagtcccacgaccagtgattgagaagacgtcttcaacaggcatcaagaaaggcttttcagtatcacgaactggagttgggatgtattcatcaacaacatccattaagtgcatgataaccttttcttgttctgggtcgccttcaagtgctttaagcgctgaaccacggataacaggaatatcgtcaccagggaaatcgtattctgaaagtaattcacgtacttccatttcaaccaagtcaactaattcgtcatcgtcaacaagatcagtcttgtttaagaagacaacgatatagtcaacaccaacttggcgagccaagaggatgtgttcacgcgtttgtggcataggaccatcagttgcggcaacaactaagatcgcaccgtccatttgagcggcaccagtaatcatgttcttaacgtagtcagcatgtcctggggcatcgatatgagcgtagtgacgcttttcagtttcgtattcaacgtgggcagtgttgatagtaataccacgttcacgttcttccggagcagcatcgatagaagcaaagtcttgttctttagccaagcccttagatgctaataccttagtgattgcagcggtcaaagtagtcttcccatggtcaacgtggccaatagtaccaatgtttacatggggttttgttctttcataatgttcttttgccattaatgaaacctcctgtgattttcgcaagaataacgtcgaggccaaaatggtctcaacaattctttagttagtattatactacatcctagtgaaaaggccaaatcgcgcacccatcactgagaatccttaaatattatatatagcctaatctgatttgtaaacagatattattcaaaaaattgaatttttgttagtaaattcttattacgcacgcttatgattgtaaatcaaggctaaattgctgaattttttgctgaattttcatcattttttcagtttggtcatcagacggcgttatcgtctgcccagtttgcaaactaatcaaaagatcgatccaagccgtggaatctgtaataacctgtgcagcgcatggatataaatacattaattgcaattgtaaaagttctcgtaagctttcatataaaaagacatcttgattaccaagtcgcactttcaaagcatggtaaacggccttgctcgtctcgtcctgaccgagtgcgactaactttgctggacacagtgtcaacatcttctcatccagtagccactgcatcttgaccgtctctgatacttgcaattggtacagtgtatataacacttctactcgtgttaagggatgcaaaaacggatctactaatagaaacttggctgccgtcagatagcgctcatatggcaggtgacgggctgcttgcaaacctgccacctgtttctggacgggctggtcagataaatgataaaaatgacgcattgttgtggtcaatgtcgatcctagcgttcgctcagccgtactctccgccgcttttaaagttgtgtttgcagccgtagtccacgcactcgttgggcgtgccttgatcataatgtgggcagaaatgaagtcatgattagcaaccaatgcattcagatacagatctgcggccgcatcggttgctaaatactgcgcttcaaactcactggcataattagctgctgccacatattgttgatcagcaaccaacgcttggaccagttcgtaattaactggtgccgtttgctgtgcctgatacacttgctcccacaaactagccgccttggaccaatcctgagctcgactggcttgttcggcggccaattgtgtttcagctattgtcattgaaccttcctcctcttcattgtaaccaaaaaagtcggaagtagcttccgacttttttaatactaagctttagattcagtctcgactggtttggctggtttagccttctttgtacgccgatgatgctgattaacttccataataaccggtaaaataactgggtgccgcttggtctggtcccataaataatggttcaacttctcacggacagcctgttttaaatggccccaatcaaactctttattatcgagattttcttgcaccgtcgttttgactaactcagcgctctcttgcatcaagtctttactagtcttgacatagacgaagccccgtgaagtaatcttaggagtcgcaataatcttcttctttttgcgatcaatcgtgaccactgccacgaaaataccgtcttcagacaaaatcttgcggtcacgtaacacaatgtttccaatgtcaccgaccccgatgccatcgatcatcgtatcgccgacttcgattgaaccggccaagtgcatggtatcaccgtcataacgtaactggtcacccttggctgcgatcaggacatggtcgtccggaattccaacttcacgtgcaaagtccgcatgagcatccaacagacgatactccccttgaatcggaatgaaatattggggcttcatcatgttgatcatcatttgcaagtcacgtttagcggcatggccggaggaattcatttcatcagcaatcgccttaacgtccgcatcagcacgataaatcatatcacgggtcttggcaaccacggtttccatcgaatgtgacggtgtggtagtaataaataccagatcacccttttcgatattgaccttgctctcctgcttattagccatccgttgtaaggccttaataggttcgcccattcggcccgtttgtaaaatcacgatttgttcaggtttaagtttatcaatggctttaagtggtacgacaacgtcttcaggcatgtgtaacttgcctaaatcgattgcggtcttcacgatactctcaacgtcaccaggcattaaagcgactttccgattagactttgcagcggcatctaaaacttgctgaatacgcaagatattggatgcaactgaagcgacaatgatccgtcctggatgatatttaaacgtttctaaaacataggccgcaatttcacgttcactgaccggctgttcataattttctgcattagctgaatcactaagtaacgccaagacgccttttgatccaatctccgccaaccgcgcaaaatcagtctgatagtcgcctgcggccgtcggatcaaacttaaagtcaccggtataaacgacctcaccggcactggtttgcaacacgattcccattgaatctggaatcgaatgggtcgtgcggaaaaacgaaaccgtgaccgtgccaaaatcaatttctgtcttctcattaatgatgtggaagtcattaaagtttttagctttagggtccttttgcaattgaatttttgccaactcaatggttagctctgaaccaaacacgggaacgttgaactcattcaaaaagtacggtaacgcaccaatggcatcagcgtggccgtgggtcaaaaagacaccgacgattcgatcagcattttctcgcaaataactgaagtccggaatcacgatatcaattcctaataactcattttctgggtactttaacccacaatctaaaatataaatatcaccatcgacttcgacagcatacatgtttttgccgttctcacggaccccaccaaatggggtaatttgaatttcactactcaattatttcaccttgattcttctaaatgtttaatgttttaaaaagctgagccgtttgttcagtactcaatggtaagattggtaaccgtggttcacccaccggctgacccaaatgatttaaggccgctttaactggcgatggcgatggtgcactaaacaaggcactcatcttgggtgttaagtcccgttgatacttagcggccgtggcaatctcaccctggtcgatggcactaaacatcgccgtcatttcgtcaccatagatatgacttgccactgagataaccccagcaccaccaatttccttggcagccaaactctgagaatcttcaccagtataaacaagaaaatcagccggtgcattttcgacaatcgcgccaaactcttccatcgtcgcacactgcttaatcccaataatattgggattttgtgctaatgttaagatcgtggccacggtcatcttcacaataacccggcccggaatattataaataataactggtaagccaccttgatcagcaaccgctgtaaagtgggcaatcataccagcttgatcaggcttgttgtagtagggaaccaccactaaagctgcatcaatccccttaatctgactaaccttcttagtaaatgcgatggtagcagcggtactgtttgagccggtcccggccacgattggtacccgaccatcgacaatctcagctgctttctttagtaaggttaatttttcatcttcggttagcgttggtgcttcaccagttgtcccacccaccagaataccttgggtgccgtgtgccaataaatgttcaatcaaacttgctaaccgcttttcgtccaattgttggtgatcatcgaaaggggtcaccattgcggtcatcaaatcaacgtttgcaaagttcatgatctaaaaactcctctattaaaatttacaagtaccagcgtacctgttccgattaagtaactctccccagtttaccacattttaaagtaaagcaatagttagaccattcaatgcaatctaatgtggtcgttgctgactaaaatacgcgacccacagcatcaatgccatcagctgtaatccagccgtaacaataaagattgactgatacccccaccaattggcaacaatcacggctaacccggggccgaccacgttaccacaagcttgcgcggactgatttaaactaaacacacgcccaaacgctgcgtgtgggacatgctcgactgtcatcacttgaagcgcgggcaatagtgccgcatccgcaattcccagtattagccgtagcccgaccagccacgcgacctgatgtaccaaactagtcaacaataagtcaacaatcgctaaaatcaaaaaagtaactaagcaacggccagcgcccagccgatccagaatgcgcccaacacgaccagccattagaatcgtggcaagtcccggcgcagccgccacaatccccgtcatcaagataatcgtctgcgccgttgcttggggcgctaactgtccgaccagcaagcttaacagtggtgttatcgcattggtcgtcgcctgaacaactagtaacgatgtcagcaaggcacaaataaagcgaccacccaattgatgtaagattggtcgcaatggtggtaacgtggcgcgactaactgccgtcaccttctcttgaacaccccaccaggtcatgacaaagacaagcgccatcaaactactggtagccacgaacgccccccgatagccaacggtattagccagaaagcttcccaaaagtggccccatcaatgtgccactgatgctaccagtgaccagtttacttaaccactggccacgttgttccgcaggtacggtaatcgaaatcagtgcgttagcattattgatgtaacctgaaaacgctccctgtgcggctcgtaaaatcaagaggacgatcacgttaggtgctagtcccacaccgagaatcgttaaggtcatcatgccagatgcgcgtagacacatcagcttacgccccttttgatccgccaatcggccccacaatggtgcgactaaagctttgcaggcgtatgtcacggcaaacgccgctgcccctagaaaattcaactgggtcgttgaataatcgcctaatgtctgaatatacagcacaataaacggtaacgtcattgcgttacctaaatcagtgattaaactgccaaaccataagacccgaaagttacgagtcaacgttgccattgcttccatgaaatcccctcattcacttttgaataaacataagtatagcgaacggttgtttgggtttaataaagtttatgtatcgtttctgtaattttttacacaaaaaaagaaccacccgcaggcagttctcgtaatctcaatattaacgacgaagaccaagactttggattaagtcacggtaacggttaacgtcttctttacgaaggtaagctaacaagttacgacggtgaccaattttcttcatcaacccacgttgtgaatgaaaatccttcttgtgaactcgtaaatgttcgtttaattcgttgatgtcttccgttaaaactgcaacttggacttcaacagaaccagtatcgccttcgtgacgagcatacttgttaataagctccgtcttcttttcgcgtgaaattgccatgtgtttcaaccacctttccaataattgccctaaactgagtaaatcgttggtggtgcacgaaaaactaagtaaagggttgctgaacacttgatatagtctagcaaactaaggagtaaaaagcaagtttcaatacatatcaagataaattactttacacataacggttgcattcaagccggggcttatgtataatagcatttgttgaaaaaatgatggaggtgaatctgatgccaattatcaaatccgctattgaacgcgtgaaaacaaacaataaagcaaacgtccgtaacaccgcccaaatgagtgcgatgcggactgctgttaaaaaatttgaagctgctaaaactgctggtgccgacaacgtcgacgatttatacttagcagcaactagcgccgttgacaaggctgcttctaaaggtcttatcaagcgcaacaaagctgcccgtgacaagtcacggatggctgcacgttacgctaaataagctaattttacgcccgagcattgcgacggcgtttttttatcgcctttaatgactcaaaagatggtcgaccgaattctgagaattccggtcgaccatcttttttgggggctccatatctaagcactattacttttgccttcgtgaatagtcgttctcgcttgtccaacaagccaatgcctaacgggacagccgcgttccgaccgctgcctgtcgctcattaacaaattgaaccataaataactcaaagagcaactccgggtcgcgttgtgtcgttttcatttgtacttctgtttggagcagtcctaagtacgccgcccgtaacgcagcttgatcaaaatggcggaccgtttgcatggctagtttgacccgatatgggtgcactttaagcgtgctagctaggctgccctgactatagcctgcacgcgccataattttgacctgtagcaacaatcggaattgtcctaataagattgcattgatctttagtggggcttcctgagctgccaccagttcatggtaaagttcgaccgctgactgcgtctgataacgaagtacatcgttgaccaaatcaaaaacattttgcgtcagtgatttagtcaccaaagcctgaactgccgctaaatcaattcgttgggattgggctgcgtaaatcatcaacttcggtaattgtcccataatcagtcccaactgcccgtcagttcgattaaccagttcctgtagtgcgtccgcaccaatgcgaatctgtttctcatctaacgccgcttgcacatagcgttgcgtttcagcctccgagacttggttgacttcaaccgtcgtcgcctgtttttttaacgttttaacgagctttttacgcgcatctaatttctcatagggtgccataaacaccagaatcgtacttggttcaggttgttcaaaatagtgctgtagtgaggccagatcatggtcaaccttggtcttcttattttcacccgtcaaaaagtacgggtgattaataaagactaatcgccgttcaccaaaaaacggtgccgacattgcatcatctaaagccacagctactggcgtcgtttccatatcataactgccgacgttcatcgtttgttcttcactgggaatttgctgcgtaaaagcctgtttgagctgatcggccaaatagtcgaccgttcccaagataacatagatcgatgccaagtcaccgttgcgaatcgattttaacgcctgttgtgcgttgatggcgatcaccttcctttaaaaatgtttgccaacgtccctggcgatgattaacgaaacgataggttatcatcccctgcaaagccgttgaataagtgacaatatgctgttcagctagagttattagtgtttcttgattcggatgcccatagcgattgtgccgacccaccgataaaataccgtggtgcacacctaattggcgcaaagctaacggatccgaggctgttttactgccatgatgccctagctttaaaacgtccacgcgtaattgtggatatcgggcaacgattgcacgctcccccgctcggtcaagatcacccgtaaacatgaaacgttgctgaccaaaaacccccgttagcaccaacgaatcttcattttaagcccgtcccggtttaaacggatgcaccgcaaccaatccatctgcaaacgtatggccggccaatgcttcaaccactttaggccgctttctggcgggcactagcagcttttgaaacttggctaggcgcgccattccggcaggtaccaccacttgattgaccggcatcaagcgtaatagttcacccaaatcaccaatatggtcaacatccttgtgtgataaataaactgtatccaagtgagtgatccctagccggtgcaaataattgaccgtaatcgtttccgcacgcgatcgcggttgtacctgctctgcctgccaacgtggccgggaaaagtgtagttgccccccagtatcgatcaaactcacttggcggttaaatggttggcgaatcaagatcgaatcgccctgaccgacatcgataaattgaacggcaccgtgaagtggaaaacgtagactaagactaaaacaagcatatgccagtaacagtccccagtaataccgacgccgcggtgtccgtaacaaccacaaactcaatagactgagcgtccatgcccacagtgtactcggttgaccgataatgagtaggcctggccaatggctgacccactcaagcccattctgaaaattaaccaacacccattcacacacgctggtgacattggtagaaccaaagccaatgctcgcccccacgaccgtcaccggtaataatacccaactaaaaataggcgcaaccaccaaattgactgctaaggaccacagatgccactgcgccgtagctacaagcaaaaccggtaaactgataacctgaatccaaattgctaatcgccacggcggcaaaccaggcattaagatcagcagcaaggctagtccataactgagctgaccacctaattggctcaataccaaaggattatgggcaatccccattatcagggcaaggctccaaccacccaacgccccacttgactgatgtgttagcaactgccaaataattggtaaagccgcggttacaactgcccgccgcaagctatcggcaccgccgcccaagacaaggtatgctggcaagagccctaataaccaaatatcgattgcttgctgacttagatgcagtcgtaacaagacccattgcaagaatttaactaataaaataacatgcatacccgacaaactgaacaaatgcaatagtcccagctgttgaacggcccccattgtcgtctgaaaatctgtggggcgtatcccaaccagtagactcgtcgcataacgactaagcgttggtggcaatctttgacaggctagaaagaattgctgacgccattggtgtaatcgatcaagtagcaccagccaaccacgctgcggcgcaatttctattcgttgaaccgctgtgaccgtcacttggcgggcgatgccttgactgcgataatacctaggcgcattaaactgccccgggttggtaggaggtgcgatggcggcgacttccccctgaacgtgccagatcgtccggtgagtaaactgggtcagatactgtttttcagtggcacttttcagctgtcctctaacaagtactttgcccattggactagtggcaatcagctgatactgaccaccgcgcaccgtaatcgcatcgggttggacagccaaatggcttgtgaccacctgactgggctgctgaacaatggaggcgaaacggtggttttgccagttcagccagattgccaaagataaaacacagccaatcgtcaccatcaaacactgtcgatctcgtaatcggatgactcgcaataaccaaattaataataatccggctgccagccattgttggtcaactaaccaactactaagtaagccgcacgcaatggcggcaaaaaatagtgcgcgcaattagtcacgatctaacaagatttgatcaagattcagcttatccaaatctgattggtcgaactgaacttgttgtaaagccacgtgttttcgttcaattaaggacatggcatacgcatcgttatgataattacgtaaataatgaattttttgaattccagcttgtaataacattttcgtgcattgtaaacatggaaagtcagtgacatagatttcagcaccatccgtagctgcaccgaattttgcacactgcaaaatcgcattcatttccgcgtgaatagtgcgaacacagtgcccatcaacaaggtaacacccctcatcgatacaatgaacatcgccggatactgaaccattgtaaccacccgcaataatgcgtttgtcgcgaacaatcgtggcaccaaccgaaagccgctcacacgtgcttcgactcgccaataagaccgcctgcatcataaaatactgatcccatggaattcgttgatctttcatcattttatgcctcactttcaatgacagtagtataccaaaatgtgcgctttgaaactagacggtgagctggtctttgtatttggccacagtcttttctccaaagccgctgacgtttttcaaatcatcaattgttttaaaattaccatgttgctggcgataatcaatgattttttcagccttcttctgcccgattccgctcaacgtttgcagcgcggccacatcagccgtgttgagattgaccttatccgttgccgcatgattactagttggtgttccgccagtaggccccgttgactggacgactggtggcgcaacagccggggcctgttcgcccttagctggcacgtagatcacttgctgatcagtcactttggcagccaagttgatctgctgagcatctgcctgtggctgcatgccttgtgccagttggatgacatccgcgacccgcatactagcagtaacctgatacaaccctggtttattaaccgcacccttaatatcgacatacccgggtgaactagcacctgtcggtcgggctgggctcggtgtagcgttcgacggttgggtactcgttgcgggctggtcagcattggcagacgttcgactcgcgcctcccattgatgtggaattgaacgaatgcgccaacaagttatccgtaccggcgggttgaggctgcttaagttgactcagtgcccatcccgttatcaaaataatgatcacggcagtaacaccaccaacaatccgccagtgcattttgagcagcttaatccaatctatcatttgttttcaccccttcagcgaatagttacgcaaaaggagcggctgcccatgaaaaaagtttgggttttaccccaaactttgctaacttgcatttcaattttactattggtgtgtctgcaaataatgaacggcctgtttaaatgaggtcactggaacaactttcatattaggcgcgtactttttcgcggtcgctttagcaagttgatagttagtttgacccttttcttcaaccgccaaaagcgctttggttggtttcacatacggtgcaaagaaaattgtcgcccctgcccgcttagcagcaatcactttcttgtcgataccaccaatttcaccaacttgtccattttgatcgatggtgccggtccccgcaatcttccgtccgtgtcgcaaattctgattagtcaattgctgatagatttgcaagctaaacatcaatccggccgagggacccccgatttgtccgggatcaaccttaaccggaatagtcgtcgtcactttaatattatcagttaggccgataccaatcccggcgcggtgcgtgctcagcttgattaggggcgcacttgcttgcttcaaatggccctttcgccgatacgtgatcgtcactcgatgtccgacgccctgcttaccaatataatgctgatacgcactggctgtattaaaatggtggccatcgactttcgtaatcgtatcgccaacttttaactggtttctaaattttgaattagactgaaccgttaaaacgtagataccctgataaaccttgcggtattgctgatgcgcagccgaatacgccgtcgcgatagcttcgttgattgcacttcgcatataaaacttctgaacccgattataagtcgcgtcatcctgaccgccagtcatatcctgagcactgaccacgtcatagtgcggattcaattgtgcgtaaagccacaacagcggcgtcgctcgagcttctgcgaccgaggtcaacataaacttaccccggtgatgatccggatgccgcttgacggtcacaaaagtcttcaaattatttgcacttccgggtccttcaatatagtacggtaaaggaattagaaatagtgcaagtaccaccagtatcacgaccagcaagccccagtaacgttttaacaactcccggcccttagtcatgctgatcagttcctaaccgctgatggagtttttgtgccaccgcggtcgggacgtacttggaaacgtccgctcccatcttggcaacttccttaattaagctggaagaaaagtaagcgtacgggggccgtgcaatcaagcaaatcgtttcgatcgtctcgtctaatgacttgttcatccaagcgatatcacgttcatacccgaaatcctgttcattccgcaaacctcgtaccaaaactgtcgcatggacactcgccataaagtcaacggtcaaaccagttgcggcctgaacttcaacgttgggtaaacccgtcagctcatcactgatcatcgcgactttttccgtcatcgtaaataacggttgcttactcgtattgaccatgacggccacaatcaaccggtcaactaatcgactggcacgttgaatcatatccaagtggccccgtgtgattgggtcgaaactccctggaaaaactgctgtcaccataacttacccgacctccattactttttggtaaatggtaatgaccgtaataccgtaatcttgttgtctgatcaattcaaatccgggtaagaccgttggcaagttcgcattcgtatccgtctcacaaatgacccggcaacccggattcagcaatcctagtgcatcacaatgctgaatatccttcacaatctgttgcttggcatagggtgggtctaaaaacacccaatcaaagtgttcatcttgggatgctaatcggtccaaaatacgctcagcatcgcctttgataacttcaaatcgttcgggggcctttgtaacggcaatgttatccttgatcgtcttgatggcttgatactgccgatcaatcaagacggcccgagccactccgcgtgatacagcttcgatactcaagccaccgctcccagcaaataagtctagggactgcccaccatcgaaataggggccaataatattaaaaacagcttctttaaccttgtccgtcgtcggccgagtttgcatgcctggcacggctttgagccgccgaccaccaaagtctcctgctacaattcgcatttcatcttcaccaacttaatcctcatcatcgtcatcaggcgcaccagtcgtggttggcttaaaaaagccttgatccacacgttcgccaaagttcattgcaacgtccgggcggtatgacggttcaaccctgcggacaaaatttaattttttgattttcgtggtcgcggccggaatttgactttcatccatgtacaagaccacataatgctctttacgcgattggtattgaattaatccaaaacgtttcaattgacgcacctgcttcatcgaatgcatataaacgatgagcgaccggcgcggtttaactgtaaaatccatcgaacctcacctcttctactagcgttgctgtttaaatgttaggctagattcagcatttcgtcaactaagttcttaactacgcagtggtttttattggcgaagcgctgaagctaaaaaacactagtaacctaagccactagtgtttttgcttgaaatatccttattgtggtgcaatctcgagcagtaagtcatccgtctgaatgacgtcacccgcattaacataaatatgttcgatgaccccatcttccggtgcctgaatggttgtctccatcttcattgcttccgtcacaagtaatggctcacctttcttaaccgtttggcccttcttaactaacagtttcagaactgaaccactcatcgttgcgccaacttcatcttcattagttggttccgccttgcgcgtgctggttgccgattggtgaatggcattgtccttgaccataatctcttgattttgaccattgatactaaagtaaagtgtccggacaccatcgacatcgggatcactaatctgattaagcttgacgatcatcgtcttacctttggctaactcaatattgaccgtctcaccgaaccgcatgccttggaaaaaggtcggtgtgtctaacagtgatacgtgcccgtagcgcttatggctagcgtcgtaatccatgaatactttcgggtacaggatgtagctgagcacttcctgatggctcgcttcatgaccaagcttagccgatagctctgctttgaccgcagcaaagtcagctggtttggctaaactaccgggccgcacagtcaacgctggctggcctttcaagacaatctgctggagcttctttggaaagcctccgactggttgaccaagattgccagcaaagaagttgatgaccgatgccgggaaatcgagcttggtaccctgattataaacatcgtccggtgtcaagtgattttccatcatgaacagggccatgtcaccaacaactttagagctgggcgtaactttgataatatcaccaaacatatcattgaccgtcgcatacatcgtcttaacttcttcccaacgatccccgagaccaacagccttagcttgttgctgcaagttagaatattgtccacccggcatctgcgtctgataaatatctgtctgtggtccggtcataccgttcgagaagtcttggtagtatggccgtacgccttgccaataccgattgatggcttcaacgttgttaatatcaacatcaggttgacgatcattgtgggctaatgcgtaatacaacgaactcattgatggttggctggtcgtgcctgatagcgcactcgcagcaacatcgaccacgtcaacaccagcttccactgctcgggcataggtaaagattccattaccagtcgtatcatgcgtatgcagatgaactggcacggacagcgcgtctttcaacgtcgatactaattcataggcggcctctggctttaacacacccgccatatccttgatggcaataatatcggcaccagttgattgtagatccaaggccagctgacggtaataatcaagattgtatttttgccgatcagggtccataatgtcgcccgtataacaaatcgtggcttccgcaatcttcccggtttccttgacggcctgaatactcttttccatttgaggaatccaattcaaactgtcaaaaatgcggaaaacatcaatgccactcttagctgcttctaagataaattcgcgaatcacattatctggatagttctggtaacccaccgcattggaaccacggaacaacatttggaagagtgtccggggcattgcctgccgaagttctttcagccgattccagggattttcatttagaaaacgataggccacatcgaacgtcgcaccaccccacatctcataggagaataactgtggcaacgctttttgtgaagccgcggcaacggctaacatatccttcgtccgcatccgcgttgcaaataaactctgatgcgcatcccgcatggtcgtatctgttaataacacttgcttctgggctaacaaccactgttgtaatccctggacaccttgttgatccaacacgtcttttgccgtgacgatgtcgggtgcgatcggttgaaaatcatccttaaactcaacgtccggatagtacttcttcgaatgttgggcaacgtcagcgaaaccattgaccgtcacatttccaatatacttcaacatcttatcttcacgttgcgtatcgtcagggaatttgaagagcgttggggtctgatcaataaaccgggtccccgcttcacctgcttggaacgttgggttgtcaatcacattcagcataaacggaatgttcgtcttcacgccgcgaatatcgaattcaactaggacgcgtcgcattttatgaacggccgctctgaagttccgcgccgcaacacaagcctttacaagcagtgaatcaaaataaggcgttacgattgcgccggaataggtattaccagcatccaaacgaaccccattaccacctggtgaccggtacgtctcgatgcgaccagtatctggcataaaatcatttgcgggatcttccgtcgtaattcgacactgaattgccgcacccttatatgtcaatgcgtcttgatgtggtaaccgtaaatcctcgaataggtcaccacccatcgcaattttgagctgagcatggacaatatcaatttcggtaatcatttctgtcaccgtatgttcaacttgaacccgcggattaacttccatgaagtagaattggtccccttcaaccaagaattcaaccgttgcggcgtttaaatagtgtacactcttcatcaagtcgactgcggcgttacagatcttttgacgcaactcgattggcagggccacggccggtgcaaattcaatcaccttttgattacggcgctgaacagaacagtcacgttcaaataaatgcatgacattgccgtgagcatccgctaaaatctggacttcaatgtgtttgggattcgcgatgaatttttccaagtaaatctcgtcatcgccaaaggattgcatggcctctgaacgggcacggtcaaaagcttcttgtaattcagaagcttcgtgaacgatgcgcattccccgaccgccaccacccatggcagctttgatcataattggataaccgtattgctgagtaaattgtaacgcctcgttcaggctagtaaccgggtgcaaggtactcggaatcgtctgcacaccggcatcgcgagccacacgtttggccgtaatcttatcaccaaacatctcgaggtgctctggcttaggaccaacgaaggtcatgccttcttcagcaatccgccgagcaaaagtagcattttcagataaaaagccgtaacctgggtgaatcgcatccacatgattttctttagcaatgcgaataatatcttcaatatccaggtaagccgcaatcggcgccttaccctcacctactaagtacgcttcatcagctttaaaacggtgaactgaaaactcatcttctttggcgtaaatcgcaacagtctgaaggcctaattcgtggcaagcacgaatgacccgggtcgcaatttcaccacggttagcaattaatactttcttcaccaaaatccctcatttccaaataaaatcgtcttagcctgcctgtcgaactgtattaaggcgcgccattttttcaagtgcactaatgtttaataccaatcctagtgaaagcgtcaataccatcatgctagaaccaccataactcatgaatgggaaggtcaccccagtaatcggaatcagaccaacgatcccacccacattaataaatgcttgaatggtcatgtaggctgcgacaccgtaacagaccaacgcgttgaacgtattagtcgcacgaaccccgatatagatcgtgcgcatcacgatgacaagtagtaagcccattacgattaaaatgccaattagtccgagttcttcggcagtgattgacataataaaatcagtgttcggttcgggtaaataaccacgtttttgcaaactattcccaatcccaacgcctgtcaaaccaccgtttgagatggcatagtaagagttgactaactgcgtccccgctcctgaagccgttttaaacggattcaggaaaccgagaaaccgccgtaactgataagaatttgcaaaagcactttggggcatgcgactcactaaaggcactaaaatccattcaaaggcagcgaccgccccagcaaagacaccaacacctacaaagtatgaaatgccactcgcaaacaaaataaccgccgcgatggctaaattaatcgtggccccaccaaggtcgggttgcacaaaaatcagtaaaatcatcgcgaacaacatcacaaactgagcacccaattcacggattcgagccaccccaaaatgtgcctcccgttgagaaataattgatgccaagtaaatgatcaggtaaaacttgcaaaattcagctggttggatcgagactggtcccaaaatgatccagccagccgccccattaattgattgaccaaccaatcggaggagaaccagaacaaataacatcgcaaaccctaacataccaagtaacttggtttgcttaaaatagtcgatcttcaaattcatacaaaccaaggtgatcactaagcctaagacgacccagatcagttgtttaactaaataaccggtgggtgtcgaaccgttttgtgcggctacgtatgaactcgatgaatagaccatgacaacgccgatcccgctgagaatcaaatacgggataaacagcacatagtccatatagtgtaactttttccacatgagcttaaatcccaccctaattaatatctcaattcgggttatcccccacaataacgcgaactgtttgcttgcaacaattatagcataagtcgattttaacacagcattttcacatattaatttgttgttttttaattaagtttggattactgatttacaaactagtgcgtttagcctcattagtaaccggctggccaacgcctccaaatcagtgtatttcccttaataaacgtacctagacgatttgaacaacccgcgccgttccggcacttgacgtcggaatgaatttatcgcgcattgccacccataacgcgataagcgcccccgcaagagccaacaatcgacaacgtgaacgataaaatagccgtggtaagccccatttaggacccaccacagctattttggattgctaaccgctcgttaacgatcaatttcgtgtcacgcactgggaacgattgcacgctcactcggcctcatctgccgcaatcgcggctcgcaacttacgctgataccaatccctaacacgctggatattcgcaactgcccgttcaaatgagaatgcgcccagtaatagcaggcacggtaagtactgaattaagtaccgactccgaccaccttcgaacaagaggaggaagataaacccaccaatcatcgccaaccggagcaattgaatcaattgccagcgcgggccaaaacccaacgcgataattacgagtagtactaaccaccacagttgcgccacaaaccgaaaatctgcaatatggcgaccgtataaataaataaagttttttaaccaattactaaagccctggttgcttggtttttgattttcgcgaaagaaattgccttccttcaaccagccaaaggtcccgtcagcagtattattgcgttgcttttttaccaagaattcaaggtaaccccacggtcccagtttcttgagctgacgcttcagcatcttgattgagtaagccgttttttgtgccttggtgggcaaaacggccatctgtatcgcctgcttttcactatacccgccggagccgtaaacgcccatggccataaaatgaatcgccggaatcgaccttgatttatcgattttgatatacgtctggttctggatggcctgattcgtataatgataagtgaggccggcactttcgagcatcaagattgccatggcgaccgtcacaaaaatcatcgtcgtttgtgaaccctgccgcgaccgcaaacgtgctaaaaagctgatgatggcaatggcgattaccggaataatggatgagggtttcatgaagtacgttaatgtcacgctcacgccaaacccaacggcggcggccacacgcagtaacggcggtcgcttcgtttgactcatcacaaaatagcacagcatgcaaaacgaaaccagcggcagtccccaagcatccgtatacggcataataatacttggaaaaaccgctaaccaaccagcgtgcagatacatagcgattcctaacgccgagcgtcgtaccacaaatacgctcattaaattgaaagctgctgaaagatcgacaaaaaacagcgtcacgtaatcaaaaaattgccatgaagtttgaccagtcacttccgatagccagtgcataaaaagcatgattggcatgttgttttgattaagactgtaatacgccgtcacgcccacctcctggacgtgtttcgcactggtagccgcatagtggagcatcccagcgtcaaaaccactgacgggatggacaaatgtcacgaatacgagctgaccaataaaaacgagtgctaacaagacaccagccgtccagagctgatttgtgattaatagtcgatatagcacccgatgaacgcgcggatacgcatagttcataatcaacacggcgacaatcacaataatcaaccccgtcgtcaataaggtcgtactcgtcccaaacgtctcgttatcccctaaaataatattcggcgacattactgcaaataacaacattggtgcaaatagtaaccaccaaacgctcgtaatcatcttctgactaaattgataaaaataacatctcatcattaatctacttcgtttgaattcttgcacctgaactaaacaatcaagatattccgccaacttcgcgtgatatcttgtagtcagccaacacgtgccgcttcaactcattttcctttccggcgtcgatagtgattgtgaattgtacgcctatcatcacgtaagacggccaacaatcgttgccattcttcggtgaacccccgcattttccaagttgcctgggtcgtcatcgcattgataacaccaatcaatcgaatccaagctgtcaaaaacatataaagtggcagcgttaatgttagccaccataaatgcttgtagaaatggcgttcttcaggatacggctttaataaaataccaacactaataaagttaataacccctaccatgacgtataaactatagatcaagagatatgagagccccacgaccacagttgaatagccaaaagcaatcaaaacaatcgtcgcaaaagtccaaatcattcgtggaaacgtaaacgtgtgatcaatcataattcgccgcaccaaaaattctttgaaaaagcccttgatgctagctgtttgtgacatataatgttgtgcaacttccagttcaccacgttgccagcgctggcgttgcgtatataactcagaaaagcctgaaattggcgctacataaaaaatagcatctgcacaaataacgacctttttgcctaaacgtgtccgaatctgaaacgtcatgtccgtgtcctcaccgattgtatcggtgtcatacaagaaagtttccattaacacttcccgtcgaaatgccgagaaagctcctgacatggtaaacaactggtcgcggaacgactcgatggtacggccagaaagaaaagcctgtgcatattcgtaatactcatttttagccaacagccgatgccaccaaccatgaacttgcttaaccaagtttctttgtgggagcactgccccggtcatggccgcaatctgctcatcgttctcgaaccgtagtaccatatttttaatcgcgttgggttccaataaaccatcactatcaatattaatgacataactaccaatactctcgtaaatggccgcgttaagcgcgcgagctttccccttgtcagtattgacataccgtaaaaataaattaggaaacgcattttgggcgcgagcatacgccccaaaactatcatcggtactctgattattcgccaaaataatttgcatgctttttttatcatacgtttgatgatcgatggaacgaatgcagtcaaataacgtatcttcagaattataaaccggtacaatgatggttacccacggccacttagcaggcgctttaagccggggcatgtggcgatgtagtcgcattaacttaatagtcgacataattgccggaataatttccaccacgatcggcactaaggcccaggtaatccaaaaccccattctagtcagcgctaagtttatccagtacatcacaggattcgctccctccaatcaataaactgctgataaagtcctcgagctaactgtgaataggtaaaaacattgtaatataagacaatgaccagaacatagaacagtaaccgcccaatcactgaatgagccagaaagaatgtttgaccaccgccaaagtgaacaatcacaatcactacggacaggcgtaatacattaatcaagtaaatatacaacaatccaaaaacaccataaaacaccttttcacggcgctggtaagccgggtaaaaggctactagcgaaataaatgcgcacgtctcaatgattcccgagcattcataatcaatcgacatgattaccggattaccactattaataatgtagaccaggcccattttgaacataatactgcaccaaccggtaatatcactaaacagcgctaccccatgaatcacagcgtgggtaaaaaaccacacccaatacggacgactaattgccgtcaagataaaaaagagcccggcgcttcccacaatgaagtagaaggcagatagccgagcccgtttgagcactgacagtccgtataaccatatcacaatccctagtaggatctttacattcatcgtacatcagtcctattaattagcttaccgacgcgcctaagccgccggtggttataaattgattgtcagtaaattaaatatcattagttcaatagttatcgattcaattcacatcgtacaagttaatctatctttaatcatgattaaaacatgccaattttagattcctgttcatcagccggtgcgcgtcctatgccgacctccggggctgggtgccaattgctggaacgcagccgacgtcgatttgagctaacgcataacccgcgtcatctcaaatacgagtcttattctaagctggaagaaagacacttccgactaagaataatttggctactgagcattgtcacccagcccctccggtcgggaagccgctcgaatgcctaatgaacgaccatcgaactcggtacaatttgttgttcgctattttgatactggaattttaaacaaagcgttaggtgtattaagcactccgtcaagagattaaatctcactacaacaatttaggattagtgagctatctcaatatcattttcagtctgacagttgattgacaaaattatggtttatgaaaaacaatgacgaattcaccaaaagttgggtacgcacatgtccgccattcgaacactgtcccgactggaaggcgtttcggccaatgctcagcggtgaaattccacttagcaagcgtccttggcttggttagtggaagaccagtatttaagacgtgggttgcggcttaaatctgtgtccaccgcgttccagcaattggcagaaatgcctggaagtcggcttaggacgaaccagcaaaacaagtttacaccaactcgtatctatttccagcgggtttaagctggctgcttctgaatttaaaggaacggcacgttttaatcgtggttaatgctaaataataacgagcacaacatgttatcaatcatcagttcttagtggtcggtaaatccgttgcagttaatcgacgccgcttgcggaatttaaagtatccccaagcaacgattacgacaccgacaccggaaattacgtacggaccagttgagcccccggccacggtcattttttgattaccaatattcggattggacatcgtaatcgtttggccggtcatcgttgaaatatcgaacttgctcaagtccactcggaattcagcaatcgaatgtgaaccggcttgagaaacatacccgttgccgaccgtcccgtactgatggccctcattgtacttaccacccgtaaatgagacagctttgaccgccccgtcactttgcgagctaggcatctcattggaccacacgtaatacttctgaccaccaatgtcgaaattataatccccgtaaccgggaacctgtccatacttcatcttgacataaacgtagacgtactttccgtcactaaccattgccatataaccgttataaccctcggtcaaagtcacgttcttccaatcattaaagttaccatcgattttaatgttgagattatcattgtcattggctgcattattgtccgtcgtcgaggacgccttggaagagaccgtgcttttatcagtaattaccccagctgagctagttgctgaggaactggctgcactactggtgctagtcgtagaacttgaactagttgtagaattcgcatttgtacttgaactggtactactacttgagctagttgaagtcgccgtaattgttccaacagtgctagtcgtagagtcactaccgatattcggattgaccatcgaaatctgcttaccactcgcactgtcagttaatcctaacttggttaagtcaatctgaaattcggcataattatgcgaaccgtcgttggtcacatatcccgtcccgacagttccatactgagtaccatcgtaccatcgttccatttaccaccagttaatgtgaaggacttgaccgttcccgagctaacactacctgaaatattcttagaccaaatataatacgtcttaccatcaatagtgaaattatagtcgccatatcctggcacagcaccatttttcatcttgacgtaaacattgacatactggccagcactcgtgagtgccgtgtaaccattatagccctccgttaacgtcgcatctttccagtcgttcatcttgccatcaatggtgatgttggcgctagcatgcgctgcggtcgtcatttcaggattgatcattgttgcccccgttacccccaaaacgagcatgcctaagatcatcaacttattaatttttttcacgatgatcacacctcccaagttcaataccattttaacgggtaacgaagaccatcagactctttttaccctataagctaatactatactctggataacaatttatcaatcattatttccatactaaatgaacccaataaccattaatggggcaactatttgagttggtgattaaacgactcctcttcaaaccgctttggacgatacagccttaggcatgccagtaccaaaaaagcacgccctattaaggacgtgcttccaagcaaccaacttacttgttcattttacgctttttagcttctttttcacgggagttcgtgttcaaaatgcgtttccgcaagcgaacatgatctggcgtaatttcacagaattcatcactattcaagaattcaagcgattcttccaatgtcaaatgcgttggcgtcttgattgtcgccgtcaaatccttgttagaagaacgcacgttggtcatgttcttacccttagtaatgttaactgaaatgtcattttcgcggctgttttggcccacgatcataccttcatatacttcggtacctggatcaacaaaaatcgttccccggtcttcgattcccattgtggcgtatgtcgtagtcttaccctggttgattgaaaccaaagcaccgttacgacggcctgggttccagttaggaataactgggaggtattcagagaaagtatggttcatgattccgtaaccacgcgtcaatgaaaggaattcagttgaataaccgatcaagcctcgtgaaggtgctaagaaagtcaaccgggtttggttattaccagtactttccatgttcttcatttcagccttacgctttgataaggtatcaataattgaaccagtatattcgtctggcgtatcgatttgaacagattcaaatggttcgcaacgcttaccatcaatttcgcgatagataacttctggacgagatgcttgtagttcataaccttcacgccgtaacgtttcgattaagattgacaaatgcaattccccacgaccagaaacgacccatgaaccaggttcgtcagtatcatcgactcgaagtgaaacatcggtttcaagttcagccttcaaccgcatttcaagttgacgggcagttacgaacttaccttccttacccgcaaatggtgaggagttcgtaccgaaagtcatttgtaaagttggttcgtcaatccgtaagattggcaaagcttccggattagctgaatcagcgaccgtttcaccaacgttgatatcttccatcccagaaacagcaactaagtcaccggcgtgggcttcattgatttccaaacgttgaagaccaaagaacccaaacaacttagttacgcggaaattcttcttactaccatcgagtttcatgacagaaacactgtcaccaaccttgatcgtaccacggaagacccgaccgataccaacccgaccaacataatcgttgtagtctaataaggccacttggaattgtaaaggttcgtcagagttgtcaattggtgatgggatcgtcttgatgatcgtatcgaagattggttgcatcgtatgttcctgcttagcaggatctgattcataactagaagtcccatttaaagctgaaacatagaccactgggaagtctaattgtgattcgtcagcacctaattcgatgaagaggtctaacacttcgtcaacgacctcttcaggacgtgcaccggggcggtcgattttgttaataacaacgattggtgttaggtgttgttccaaagcttttttcaaaacaaaccgagtttgaggcatcgttccttcaaacgcatcaacaacgagtaataccccgtcaaccatgcgcatgattcgttcaacttcaccaccgaagtcagcatgtcctggtgtatctagaatgttaatttgtttgtcgccgtaacgtacggccgtgtttttcgaaaggatcgtgataccgcgttccttttcaatggcattagtgtccatcgcccgatcgtcaatctggacatgttcgtcaagggtatccgattgtttaagcatttcgttaaccaacgtcgttttaccgtggtcaacgtgggcaataatggcaatgttgcggatatcatctctaaatttcaaaattgatcttcctttcatccttcaaaattctgactatcttcgacagcagaaatcttacatatattaatacaatccgccgttactatcaagtcatagcttcaacttgaaaccttcataacgacgttttcagcggctttcatccattgacataaaaaaactgtgacatatgggtcacagtcccactacttactagacgattgccaaaattgagcgttgtgcgcgctttgtcgctatcagtacagcacccgatgataacatattaaccgggttgccgtcaactctagacacaaccaagccaaggctttccgcgagaacgcgaccagccgcaaaatcccatggtcgcaagtatgacaggtagccgaccagttcgcccgctaagacctggctaatttgaataccagcactacccataatccgtggtcccagtgatttggcaataatcgtctgcatattgaagtggtcttgaattagtaacggcgcactcgcaccaaacagccccgcactcagatcaacatccgcgggtgcagccagcaattcaccgttaagcgtgacgccgacttcaggaccaccagcatataatttattcgccatgacatcaaagatatatcccagtgttggtttaccgtcaacatacaagcccaccatcatcgcaaaatgattacgctgatgcacaaaattcatggtaccgtcgattgggtcaacgatccagacgtgaccattcatatcagtaacttggtcgccggttccttcctcagctaaaatcttcgcaactggatccaaggctcgaatctgacgcaccaaaaaatcttcattgctatgatccacgttagtgaccaaatcacgccgactcgtcttctccgcaaccgtcaagtgggtgcccatcttcgccaacacttgcgctctcgcagtttgcatcacgacttgcattttctgatttaactgtttcaccacattcgtttgcacgttaagtcacctagtctcggtattgaaatcgctgcttgttagtttcctgagctgcgcgcattgtttgataaatccgataacctgaagcagcctcataatcacgagccagtcgtttttcttccgacttagccggaacgaccgtcttaaaatcacgataggctgccaacaggtctgctgtagcgattgttccttcattagcggcctcgatggcttgataaaaggtcgtaaccttaatgatctcggccgtggtccacgtctcatccagtggatattggtaattatcattgtgtttaggcatcttcatccaactcccccgccgtgacccggtcaagttcctcttgaacctggctcgcaatctcagcgtattctttctgctcttcatcagatagcaccatatccgccattcgtttgattccgttagcactaatcagtaccggtgatgataatccaaccagctggtcgtcatcgactggtgtttggatatttgtgacggtaccgataaacggtgtctgggcgtaaaacgcattgagcacttgtactaatgctaacacactcaaggtctgattagtaacaatcgtggggtcgtcgatctgctccgtcgctgcactcatttcgtccatcccaaaactaatatcctggttagccaaataagtcatcacgggcgccggcccaatatatgaacgactccatgagatcaggtgtgtcgccgcagttcccactacgaatgcgcggacatccgccgggccgacacttaattgctgacgtagtagttgctccaataaacgactctgcggcaaagtacccaatccgaccactttagaatgatcaatgccactgaaacgcgcagctaagacacttaaaaccgcatcattgctaccagccaaaataatttttccgttaaaaccagcgcccatcgcatcattcacaaacgcgcgaaatagcggcaaagtcgcctttaaatcaccactggcatcacggtcgcttgccaatggcactaaatttccaataatcaagctatctgcttgcgaataatccggcttagcttgcgccactagtgtaaactgacgacaagttaaactcgctgttaccagtgcttggtagcgcggcgcttcttcagcacccgttgcgaccactaatttcactggcaaatctttggcaattgcgactaatattaattgttgtacgaactcgaataatccccgaataattactgtattaatcatttcaatccctccaaccttcgataataattgtacctgagctgtcaatgaattcaagtaaatgttaataaaaagcttactcttttgtaacatttttgcgtaaccaattggtccacttccccccgaagcaaacacattttgatatgttattaatatagaccactacatgctaaaaagttagcaatttgaataacaacatccgcatcaggttcaaaggcgtcacttacggatcagctgagtaatgattaacaagactgaccttcattgcgcctgacagcgcgttaagttacgtttttacgtgactatcttgactggtacttcggtaatccatactggctgcaacatcctatgtaaaataaaagtttgagactcacgcctcaaacttttattaagccatcatccgctttagatgtgcgttgggtaacccatcgcttcatccgccgcttcttgaactacttcacctagggtcgggtgtggatgaatcgtcaaagcaaggtcttcgacattcatcccaccattgaccgcaacgcttaattcagaaatcaaatcactggcacctggtccggcaatttgggcgccgacaatggtgccttcgtccttcgtactgacaagacggaagaagccgtccatggcgttcaacgagattgcacgaccattaccagcaaatgggaacttcgacgtcttcacttgcaagccggcttcttcagcttcagccttcgtcatgccaactgttgccaattctggatcagtaaagcaaactgccggaattgaaacgtagtcgttcgccgtcttcttgccactgattgcaccagcagcaactttggcttcagcaaaagctttgtgtgccagcgcagcaccggcgacaatatctccgattgcgaaaatatcctcagcggccgtccgcccctgttcatcaacttcgatcaagccgcgcttcgttaacttgacgtcagtgtattccaagcccatgtcgtcagtattaggccgccgaccaaccgtgaccataacatagtcagcatgaatctcagtttctttcccgtcgacagcgtaggtaaccgtaacgccactatcatcttgttcggagtttttagccatcgcattagtaatgacatcaacccccttcttcttaaagctgttcaagacaagcttgaccatatctttttcgaagttaggtaagatttgcggtgtcccttcaagaatcgtcacgtgagcaccgaggttggcataggcaccagccaactcagaaccaatgtacccaccaccgataaccactaattctttaggcacttcgggcaaattcaagccacccgtcgagtcaacgacccgaccactgaacttgaagcccggaatttcaactggccgtgaaccagttgcgatgatcaaatgtttgaatttataagtctgaccagtatggtcaccattcatcacccgtaaggtatgattatcatgcatataggcttccccacggaccacttccaccttatgcttcttgagcagcatttcaacgccaccagtcaaccgatcaacaacttgatggtctttccagtcctgggtcactttaaaatccaacaccggatcctgaatatttttaataccaaagatcttactgtccttggcttcttgtagccgatgaccagcactgatcaaagcttttgatggaatacaaccaacgttaaggcagacaccaccgatatattccttttccaccacggtgactttttggccgagttccgcggcccgaatcgcagcgacgtaacccccagggcccgcgccgatgatcattgtatcgcgttcttcagcaaaatctcctacaaccattctgacctcatccttccatcaaaagtaattctggatcatgtaacaattgcttcaataagttcattgcccgttgtgctgttgcaccatcaatcagacggtgatcaaaactcaaggacaacttctgcatcttaccaacaacgatttcaccatcgtcattgacgtaaggttccttaccgatacgcccaacacctaaaatggcaacttccggttggttgataactggggtaaaccagccgccaccaattgagccaatattactaatagtaatagacccaccactcatttcactggcctttaacttgccatcgtaagctttttgcgtattgtcagtaatttctttggcaattgcaaacaagcccttaccttcagcgtgcttaatatttggcactaacaatccacggtcagtatcggtagctaccccaatattgaagtagtgtttgtaaacaatttccttgtttgcatcatcgatcgacgcgttcaattctgggaattgttgtaaaaccgcaaccaaagctttcacgaagtatggtaagaaggtaagatggatgtcgcgatccaaagcaacttgcttgtacttcttccggtgtgccatcaacgcactcacttcaacttcatcaaataaagtaacatgtggcgcggtgtgtttactgttcaccatagccttagagattgccttccgaattggcgtcatcttttcacgcgtctctaattcaggtgtgtcagaaacatatggtttaactggtgttggtgctggtgcttcacttgcagccggagccgttgtcgctggcgtagctgccggtttagcacccgttgccgctggcgcacccgtgtaattgtcaatatcttgctttgtgatctgaccatgggcaccagttggcgtaactaacgtgatgtcaatgtccttatcacgtgcgtactggcgcactgatggcattgccaagacccgtttattaggattgcccgcagccggggttccagtcggttgtgctgatgttgcagcgggagtttcagctgcttcacttgccggggcttccgtcttagtagccgctggtgtttcagccttagccgctggcgcagcgtcgccagaaccatcgtcaatcgtgacgatcacatcaccaattttagccgtttcaccttctggaactaaaatatcaataactttaccacttactggcgatggtaattcttccaccgatttatcattttgaatttcaactagagaatcgtcttctttgacttcatcaccaggttttacgagccatgatgcaatttcgccttcttcaagaccttcaccaagctctggtaatttaaactcgtaagccattggataacttcctttcatgacagtctcaggtgactgtttttcgatgccgcgtcttgattaatagttcaagatttcgcgggtttttgcctcaatttcatcttcagctggtaaccaatcgtcttctgctaatccgaatgggtagaccgtatctggtgcgtacacccggccaactggggcactgagataaagcgcacctttttcagcaatcagtgaagcaacgttcgcagcaatcccagcctgtcgttgtgcttcttgaatcgcaacggcccgaccagtcttttgaacagacttgagaattgtttcttcatctaaaggtgacaaggtccgtaagtcaacaacttcaacggagatttcttctttttcgagcttttccgcaaccttcagtgactggttaacttgtgcactgtaagcaatcaaggaaatatcagtaccttcacgaaccacgtttgctttatctaacggaacggtataagcttcatccggaatatccgccttcattgaccggtataacttcaagttttcaaggaagaaaactggatcgttattccgaatagaagaaattaatagccccttggcatcgtaaggattagatggcgtcacgacccgcaaaccaggaatttgagctaaatagccttctaatgagtccgcgtgcatttctggtgtatgcgttccaccaccatatggtgatcgaatggtaatcggcatatgccgagtgccacctgtccggaaacgttcccgtgacatttgaccagcaattgaatccaaagtttcaaaaatgaatccaaggaattgaatttcagggattggccggaaaccttccaatgccagcccaattgataaaccgccaataccggattctgctaaaggagtgtcaaaaacacgatcttcaccaaattcggcttgcaggccatcagttgcccggaagaccccaccgtttttaccaacatcttcaccaaaaactaaggtcttttcgtctgacccgagttctaatcgaagtgcatcggtgatcgcttgaatatacgttttctttgacatgttacttcgactcctttgcttggaattccgtaatttgttgttgaatgttttgtggttgttcctcaaaaacattccccaagaattcggtcattttttgctttggtgcttcatctgcttgtttaacagcagccttgatatcttctttaacttgttcaacgtattcgttttcttgatcttctgaccaaacaccttgatcagtcaagtacttacggtaacgaatcaatggatcattatcgaaccaaggttgttcttcgtccttagtccggtaacgcttaggatcatccccagcattcgtatgcgggccaaaccggtatgtcagcgtttcaatcatgacaggaccgttgccagcagcagcgtattcccgggcggcctttgttacttcataaacagctaggaagtccatcccatcgacctgaacacttggaataccggcagcaactgctttttgagccaacgtcttcgcagctgtttgcttgcgccgtggtactgaaatggcataaccattgttttgaacaatgaagacggccggtgcttcgaaggctccggcaaagttcataccttcatagaagtcaccttgcgaagtcccaccatcaccagtataagtgtaggcaactttgtcttcggtaccgttctttttaatccctaaagccacaccggcagcttgtacgtattgagcgccgataataatctgtggtggcattgcatggaagtcttctggatattcgttacccaagacatgaccacgagaccacaggaacgctttgtaaacaggtagtccgtgttgaatcaattgtggaatatcacgataagcaggcattaaaacgtcggttttcttcatcgcggcgttactccccatctcactggcttcttggccctcagtcggcgcatagaatcctaagcgtccttgccgtgtcaaagcgttagaacgttgatgtaacgtccgttcccataacattaatttaaagaattcaacgagttgttcgtttgaatatttagagacaatttctggtttaattactttagcttgaccatccaatacttgcacgggctcaaagtctttcccaagtgcatcgcggatcgcaccaaaatcaacaattggtttttcgttgtccataaatgacacatccctttcatgaacgtacaaacgttgtgcatcgcaccgcgttcgtaatcgttttcataattacaagtctaatttaccattgcgtttcatcttttgcaagcccttccaaagagcgaaaagccggctttttctgtccaaatgattgtgaactatttaatttgtgcttaattctgttttcatctttttcataacgggcgctactttttggcgtaggcttatgataaactagatattaagtgtaaactgcgcgatcttaattttggaggtaattggaattgattaaaatgcgcgacattatccgcgaaggtaatcacacgttacgcgcggaagcaaagcaagttaaatttccgttgagtgaagctgatcagaagttggccaatgacatgatggaatacttagaaaacagccaggatcccgaattggctaaaaaatacggactgcgtgccggtgttggtttagctgcaccgcaagtcgacgtttcggaacagatggctgctgtccttgttccgagtgaaaatgaagatgatgaaccggtctttaaagacgtcattatcaatcccgtgatcatcagtcactccgtccaacccggcgccttaactgaaggtgaaggttgtttatccgtcgaccgtgatattgctggctacgttattcgacacgatcggattacgttacgctactataatatggctggtgaagagaaaaagattcgtctcaagaattatccggccattgtttgtcaacatgaaattgatcatcttcatggtattttattctacgaccatatcaatggcgacaatccatttgccgctgatgatgatttagttctaatttcttaaagtcatttaaaaaagcagtcctgaaatgttcaggactgcttttttggtgcactcgaattcaaccgacgcaaatcttccaaatactctaaagtggcctcattcatcaaataggcaatatctaagtggagctgtccgctgcgcagccacgcatcagtcactcgtaacgctggtccagcttcccgaaaagcaaccacctgattgtgaattgcgtacgcttgcaattcgttattgaataatcgccgaacttctggcaaatcggccgtgaccatgcctggtgcatctagcacgtactcaaaggccatcacaccacgcccccagacgtctgcgacgggcaccgaatgaatcgcccccgcaacctcttgaatcgtcatcgcatttgcgagcactttgaatgctgctaccatcgcactatcaaccgttcgttggccagcccgccgaatcttcaacgccgcacgcttcagcacttgccgtcgcagcaattcataaacgacgattgccattagtaccccaccaatgattgttaaccaactctgcatgctcaaccctcaattctttttttgtataatgattcacaattttaggaatttttcattttattacttatgtttagcatagcatgtttcatcaaaaaaaattcttttaaccgctctatttttgaagaaagttaacattgtatacacccatctcaaattatgctaaaatgtaagataattgttgtgtttacacaacctggtgtacggatcaaacttttatttttgctatctatttagattacttagtatctaaataaatcttgtttatattaaggagttttacgcatgatttacaaagtatattaccaagaaaccaaagaacggaacccacaacgggaaacgacccaatctttgtatctcgaagctgagaccgaagtagcggcacggaccttagtggaagataatacagatcacaacatcgaatttatcgaaccgttagaaggtaacttcttggattacgaacaaaaaaatccagagtatcacctaacggagttcaataaatgaaacggttaaacgtcaaaaataacgaaaccgctgtttttgcagtcggcggtttgggagaaattgggaaaaatacctatggtatccaatttcaagatgagattattctgattgatgccggaattaaattccctgaagatgaacttctcggaattgattacgttattccagactattcttatctagttgcaaatcagcaaaaaataaaagctttagtgattacgcacggtcatgaagatcatatcggtgggattccattcctattaaaacagatcaacgtgccaatctatgccggccccctagccttagccttgattaagggtaagttagaggaacacgggttattaaaaacaactgaattacacgagatcaatgaagatacggtgctcaagttccgtaagacgcgtgtctcgttcttcagaacgacccattcaattcctgatacactgggaatcgccgttcaaacaccacctggcacgattgtagaaaccggagactataagttcgatctgacaccaattactaaccagccgccgaaccttcaaaagatggcgcatctcggtgaacgtggtgtcttggcgctaatgtcagacagtactaacgccgaacggccaatctggacgaaatctgaacggtgggtggcgcaatcaattcgccacatttttgaacaagttgaaggtcgaatcatctttgctacctttgcttctaacatctcgcggattcaagaggcagcgcaagtcgcccttgaacatcatcgtaaaatcgcggtatttgggcgtagtatggaagcagctatcgtcaacggacgtgaattaggctatttaaacattcctgacgaagccatcgttgatgctaacgatttacgctccctccccgccaataaagtcatgattctatgtactggttcccagggtgaaccaatggcggcgctctcgcgaattgccaacggtactcatcgccagatttctattgaacctggcgacaccgtgatcttttcaagttcaccgattcctggtaatacgttaagtgttaaccacgtaatcaacgaactcgaagaagccggtgcgaatgtcattcatggtaaagtcaataacattcatacatctggtcatggtggtcaggaagaacagaaactgatgctacggctgatgaaaccaaagttctttatgccgattcacggtgaatatcgaatgttgaagattcacaccgaactggccgaacaatgtggtgtgccactagaccatagttttatccttgaaaatggtgatgtgcttgcctttacgaaggattctgcccgggttgccggtcactttggtgctggcgatgtctatgttgatggttctggaatcggcgatattggtaacgttgtgttacgcgaccgccaagtgctttcggaagaaggtttggttgttgtcgttgctaccatcaatttgaacaaaaaagagatccaagctggtccagatattctgtcacgtggttttgtctacatgcgcgagtctggcgatctaattaacgaagcccggcggcatgtcttccgtacgatccggcgcaaaatgaagtcggataaagcaaccgaagcgactatccgcaatgcgattattgacgacctgcagagtttcttatttgataagactgaacggcacccaatgattctgccaatgttgattatgaactaactacttgccggaacgatctcgttccggttttttatggtgtaagactgatatgaggtgtaattttgattgctgaatactacattattattaatgaactggcaggatctggtcacggtaaggtcgtttgggaaaccgtcaagccgattctagaacaacgacagattcgatttgaatatcgaatttctgaatatgccggccacacaattcggctcgcaaatgagtacgttaaaaccattcaacgacgaccaaacgtgaccccggtcattctggtcattggtggtgatggcacactgaacgaggccttgaatggtattatgcaggccccacaagctgaaccgatcccgctcgcctacattcctggaggttcgggcaacgactttgctcgcggtctgggtatggcgactgatccagcaattgcacttgcacaagtactcaacaatatgcggccccgttcgttaaatgttggttatttccatgaaaccttgaaaaacgaacaccggtatttcgtcaacaacgttggtttaggatttgacgctcaaatcgttgatgacacaaaccgtagcaaaaagaagggccgtctgggtcgttgggcttatctcagtaacatgctggccgcatattcccaacaggaaggcttcccgctaaccgtacacgttaaccggaagcgagactattataagcgggctttcctttgtacagtctcgaacattccatactttggtggcggagttgaaattctgcctcaggctaatctgcacgatgatcagctcgaattaatcgttgtcgaagagcctcactggtggattatcctctggttgttcgtcttactgctactgggtggccgtcatctcaagtcgcgtttcgttcaccattatcgcaacgctaacttgcacttgttggttaactctgttgaaattggtcagatggatggtcaaattattgggaatcgtaactacgacctctacttgtccacccatccctacccattctggatcgacactagtatccatgaccaccactaactctactgctaaaacaatacaaattaacgataaaaagtcgttgcgaagatgctcgcaacgacttttttataggacccagattggcaattcatactacttgagcaccgtccacttaccggccagcaatgctaatgaccacttaattgactccccacccactcggctaataaaaaagactgctgaccatctcaatatggtcacacagtcagtcttgattaatcttagtcctcagaagcgttgattgcttccagaagcatgtcaagttgttcacatttacgagataagtgactcacccgttctttcaaatgcggataaatggtcacaacccgtgagcgatcctgttgccgaacggctagcgtccttaaatgatcgagttcggtattagcctcttgatattcttctagaatctcaaaacgattactcactgatagcacttccttatcacaatagatggtccaatttttcgaattgaaaaacgacaaacataatataccacaattattggtaagtttaaatcataaaattcaaaaaaatttaaataaaaatccccctaacacttaacaatatcgtgttagggggattagcaattaaaatcggcttacttaaccgtacctgcaaaacttggcatgaagtatgaactgattgtctgaacttgaacgttttggccttcagttggagccgcaacgtattgattatttccaatatagatggcatcgtgataagtgctaccacgactaccccagaataaaatatctccaggttgagcatccgcaacggaatgcgtcgtcacataagattcctgtgcaaccgtactatgtggcaaggtaatcccagctgcatgttggtaaacataggaaactaaaccagaacaatccattcccgaaagactcgcaccaccccaaacataagggatgttggcactagccaacttcagcgcaaggccggttacagaaccagtagctaaatcactcgttgaactagtagtggtactgctactattagtcgttgcggtactacttgcggtattgcttgcactgctagtggctgctgaagaactactctgactggtcgtgcttgaactagtcgctgccgagctactctggctggctgtactcgtagttgatgctgcactagcagctgtacttgatgcttgactagctgtgctagtagcagtcgtactgctagtactagttgcactcgcagttgaagcggtactttgactagtcgttgttgaactagcagctgatgaggacacgctactcgttactgaggcgctcgctgcaacactcttcgactgactggtagcagtcgaagaactagcactacttgctgatacggctgcactcgttgcgactgctttgaccggtgcatttgaggtcgtagccgttgatgaagcaatagagccggtcgatgatgatatcgttgacgtgctagtactgcttgctgagttcgcactgacagcatcctgacttgctgcactggtgctacttacaacgcttgcactcacacttgaaaccgaactcgcacttgtacttgaggtggaactcgcactaacagccgtcgtggccttggcagtcgtactcgtagttgacgctgcactagtagctgacacggttgttttttgactcgtcttagcggtcgtcttggtcgttgctcctggcacttgaatgttctgacccaccacaattaaatcgccagaaagaccatttaacgtctggagagcgtgaacagaagtgttgtacttatcagcaagcgcccaaagagtgtcacccgctttaacggtatatgtacccttagtagcggctttcttagttgctgacttagtcgtggcggtcttagttgcggatccaccaatttgtaagttttgaccaacataaattaaatcgatattaccatcagatgctttaatctggttaagtttttcaatactctgcacggaaacaccgtgttgttgagcgaggccccaaactgtatcgtttgcttttacagtgattgaggcagcattggcagcttggcctgtagcaagcaataaaccaacggcaccaaccgtactggctaggaccttgcccgttgtatgtgcttgtgacatttaattcactccttagtttttgaactcaaattaacagtaacaaaatcgtcttgtgactgaagattaagaaattcttaacctgcttttacaaatcataattttattgtagcacaatttaccaaaatacaaactagaatcgctcgtttttttacaaaacagtccggttattttaaaaaacgtttgccaatgccaaagcggcgtatttggctgttatagcaacgtttatgcatataaacggaatgttatcttttgattacttcaagtaattagttgcactgtttggacgagttacgctattcagtaaacgaacaaaaaagcacattaacctttttgtaggttaatgtgcttaaagttgcgagctagatgcgaggatcaaacaaccgatcaactggttgctgttcatgtactaatttgattgcatcacccaataatggaccaaccgaaagttgcaccaacttatcaaattgtttatccgctgggatctgaatcgtatccgtcacgatgactttctcgaacttggaagcctgtaatttagccactgcatcctgtgaaaagattgcgtgagtcgcacagccgtatacggtcgctgctcccgcttgtgctaaagcatctgccgagacatcgaaccgagttcccgtatcaatcatatcatcgatcacaatggcgacgcgccctttcacatcaccaataatactacttggcactaggtcatcatcatctgggtgtcgattatcaataatcgcaattggggcccccaatagttctgccatcttacgtgcccgcgaaacaccggcatgatctggtgacacgacgacgagattatcggtaatgccgcgatctttaaaataacttgccaagagtggggccgcaaataaatgatcaaccggaatatcaaagaatccttgaatctgtgcggcgtgcagatcgaccgtcaagactcgactggcccggtccttttccaataacgttgcaattaattttgcagtaatgggctcacgtgaacgcgctttgcgatcttgacgtgagtacccgtaataaggaataaccacgttaatttgactggcactagcacgtcttaaggcatcgatcatgatcaataattctaatattgtatcattgaccggttccgaaatagattgaatgacgaaaacttccgccccacgaatactttcttcgatgttgatctgaatttcaccatcactaaaccgctttacggaacttttgccgagtggaattccgacccgctgcgcaattttttcggctaacggtaggttcgaattcagggcaaacagtttcagtttggcataagattgatctgttgacataacgacctccataaaagttgtttgatgattttgctactttgattatagcagtaaccacggctaaaaaccgcacacaagcaaattttcttgcataatgagcgtcgccgacaatgtgtcgttcattgtaatttcagttgcaataaccaattaattatcaattagctacttgcggcatgaaattagctggcgtgataccattcatgccaatcatcggatcgattcggccagcgctgactagcgctggggtcaaaattgttggtccagcagactgggaactcggttcctgagttttttcagtggccgactcctcgtcagaagcaactttcttaaccgccgtcgctttttcgccggctggcattgcctctgcttggtcagtagtcgcaatagtggccgtttcatcggatacggtatccccgccaaagacttgttgtaaccgtttcgtcagtgtggtttggcgattaaccgattcattggtaacgctccgctcaaatgattgactatcacctaacaggatcagcatttgttcagcacgtgtcacggcagtatacagtagattgcgttgtagcatccgtgcaaattgtggtaccagtggcagaatcaccattttaaactggctcccttgagacttgtggatcgacatactgtacgctaatgtcaatcgattccattcattgcgttgataagtcacttcattttgatcaaaggcaatcgtgatctggtctttcttcgattcattgtgagaatcatttgccagatcgataccgacgattttaccaatgtcgccattaaaaacattatcctcgggtgaattaacgaggtgcaggaccttatcaccgacccgaaaatcttgaccgttatacgttagatgcttctgatgggcactcttcaacggattaaagattttctgaaccgtggtattcagctgatcgatcccggcagtgccgcgatacatcggagccagaatttggacctcctcagcactgaagcccttcgccttggcacgtgccacaacttgttcaacaatgtgattgacttgataagcgttgcaggcaataaatgagcgatccggttggttgacggcaaaatcggccggtaaatgaccatctttgatggcgtgggccaacggaataatactggaatcattgccctgccggtagattgtcgttaactcaatttggggcagttcactaaactgcaataaatcatgaaacacttgcccggctcctaccgatggcagttgatccttatcgccaacaagaatgacttgcatgtgacttggaatcgccgtcagtaactgctgaaacagtaccgtgtcaaccatcgacatttcgtcaataatcaggaggcccccatctaattccttactaggctcctcgggaccatcttcacgccccgtcaacccaagcaaccgatgaatagtactagctgggagcccagtcgtttcagccatccgcttggctgcccgtccagtcggtgccgccagcaggattggaaaaggcttatccttatactgattgatatctagtgcaacgtcgtgtaattccgcatagagcgcgactaagccacggataatggtcgttttaccagtccccggtcccccagttagtagaaaaacaggcgccgtaatcgccgcttttagtgcttcggtttgtgattcatcataagtaatgttgctagctcgaccgacatgctcgatagcatgatccacggcacgttcagacaatttttcatcattatcggcggctaacaaccgttgtaaatgttccgcaacgcgccactcggcttcatagaggccgcgcaagtagatacgattctcgtcacccacgattttattttccttcgccaagacgaccaactgatcagccagcttcgaaggatcaatttgaacattgcgagcattctcaagtagttgcaacgtttgattcagcaacggttgagccgtggtatacgtatcaccgttttccacgcacagctcattaatctcagtcaatagggccgcctttaaccggtcatccgcttggggatcaattttaagttgggccgcaatttgatccgcttttttgaacccgacgcctttgatatcctcaaccaaacagtacgggttctcttgaatcttagccaaagtgtcaccttgatagcgtgcatagatggccgcagctaaccgactcccaaaaccgtacgcattaagtccaatgatagtttgctccaaaccgttattgaccgtgagcgtgtcgatcaaagtcgtctgaacgctggcccgaagtccgattggttttaaaaccttcggatcagctaaaatttgatcaatggcatcttcgcccaaagtatcgacgattcgctcagcagtccgcttacccaacccaggaaaatcactaccagatagataggcaatcaagcctgcgcgtgtcgtgggcgtttcattttgataattatccgcttgaaactgaaccccgtatttgggatgcgtgaccgttttaccggtaaaacgatacgttgtctcctcctgaatatccgcaaaatttccagtaacaacgatctcatcttccgaccaatcaatgttctgttcagttactttgactaataagactttataaaaactatcggcactgctaaaaaaaacggcagcgactttaccgacgataaagtgtgtgaccggttcccgaccaatatcgtcggaaaataaatgtgcttgttcgtccgtcacggaaatcctcctaaattagtgattttgattatctgcttgtgcggctaacattttttcaatatccgttagctgttgctgatgacttttaaaatattgactgtccaatttctgcgcgcgttcaaaccaggtggcatacggtttccccagtaccattgcggtcagtccaaggttaaaagcagctcgcccagattgcgaatcaatcttatatgcgcgttgatagtaatccgatgcttgctgattattgcctaatgcaagtaatatgtctgctactaacaaattagcgtcaagttgttgtggacgtgcctcttgagccgtaatggcccagactagggcatgttggtaatcgtgttgggccattaaagcttgtgcactcattaaataagcatcctgttttagttgatcatccgtaatttgttgataatatggtaacgctttgtcataagtttgagcttgataatagacatttcccaacgcataacgcaggtagtcggctgcgggttgttggtggtcaaactttcccaacgccttcattgctaacgcctctgcctgttcaaaatcttgaccagccgttaataataccactagttcataataagcatggtagtcctcgggctgtgcatcaatcttgccaatgagttgatggactagtgcttgctgtttagctttgctaggacgtgatgtttttgccatccgaaccacttccttctatattaaatcgtatcagttgcatcgggccgccgtgataggtatgaggtgtcattccaatctaatagcttaaaatgttgaccacggtcacgcgtctctaaaattgttgttgacgtattcgacaagccaccccgttgccgtaacgtcgccagtgtcgctcccagtaatgagttgaccaaggcattcaaggccgcaccatgactaacgatcaaaacattgtcatcgcgacgtggatttgcttgaacaatttgcttaatagcgggagtcatccgcttcagcagttgttgaaagctctccccctgaatcgctgtcgggtcatactgatccggatgatttcgaaacgcgtcgaattcggccggatacgtagcttcaacatccgtgaaggccattccttccatcttaccgagattgaactcccgtaaacgactcagtaccgttatgggtaactctgattgtgtcaaatcattacgtagtgtcatcgctgtatcacgcgcccgttttaacggactgacatagatatgactaaaccgaatatcctggagcgccgctgccaattcatgaatttcttgataactagtcggtaataatggtgaatctccctgagagccttgatagcgcccctcaagattccactctgttttcccatggcgaacaaataatagttttgtcaattgcttacttccttactctagtgtcttgatttgatcttattttcgagcaatggcccctccaaactgaataacggttgcgatgattcagcagtatcattgcaactcatcgtcaatcgccgttaggccaaccctgttaatacttcaaatgacgtggcggatggtcgtgatacttcgtcacgctcgcaacacgtcttacgttctatattatgacagttttcagactgattttcaaaatctgttcacgaattttaacgatcatcacgctattatttgataaacacgatcagttgaccgggcatggtatcttttagccactaagtatgcaactgctacaccatactgccaatggctgttattcaccgtactactcagccgtaagagtaaatcgtcgtttttccaatctacttaataaaaatataattatgtaaactaaatcagccgaaccaagttcaactccagcattaccctgctttaacaaaaaagtggtaagtagctttgaaacactacttaccaccactaattattatgcagcgggcacaatcgccaaggtccaagtaataatgctttgatactcaccaggcgttgccaatggtgttgctggtaactgtaatgaactaggtgccacatcaaaagtttgactctgatgaccagtttgccggtaaacgctggttgtcgaaccatccgttggtatcgtttgattgagcactcccgtcgagtctttgagcattaaccgagccgtcttgattgttgtatttccagcagtaaagggactcagactcgccattaactgccagtcagccccaacagtccggtcatcaaccacggccaaccgatagtcattattaccgtcataaccgtcattagcttttacggccgtcgggtctgtcgccaagtcagtaccttgtgcgagtcgctgcaggtttaacgttccaaaattaaaattaggaacggcactcaatgataaccgcccaccactcttaactgttagcaaagcggcgttggtcgtcaccgtctgtggcttgccattgaccggatagcttagactcgcatagtaggccgttccatcatcatccgcattggtcggtaccttgaccgtataactcgtatccgtgacattgagggctgtagccttaccattcttgacacgataccaattgctaacagtcaccccctcgggcaatgctggtaatgtaaatgttgccggcgtcccttctacgaccgtcacatcttgtaacgctccaaccaaaattttgacgctatcactcagaccattagaggttccggtaatcgtgacagttccgtgatcatccgcttttccggaattatccgtggcggcatccgctgcggtcacattcccatattcatcaactgccgcaagtgacgggtcactactcttccaagtaattgaatccgttgcttcctctggcgtcagtgctgcatgtaccatggtcgtttgtgcattattgagccacgcgtcatcactcgtcactttgatgccagtcgttaccacccgggctggcgtgaccgtcactttcgcgattttggaccaataatcaggaaacgccccaacaccagagaaatcatactggacttgaaaataaagatgcgttgttttggtcacttgcggcgcattgaaagtataggttcgactattagtgccaatcttctgataggtttgcccctcatccgtcgattcccaccaaacgtacttgcgaccactcaacagacttgtcgccgcctcaagcgcactgcgctgggcccgaaccgacagcgttactgagttgccaccaatcacatttgaatcgattggctgttgtgaaaaaccgcccgatagattcaagcctaagacggaactcggtggactgcttggcgattggggcgccgttttggctgctaaggcactcgtgacgatacctaaaccaaccagcatacttatcaccattaggccacaagccttgatcaactttctcatcgttcctcactccttacgcgaacgccgctggccaaaccagtacgccgccattagaagtgctaagagaatgactagtgccactgcaccccacagccaccagttgacctgacgcggtccaaccagatgatgattatgttgttgcgtccgttctgcagtcaaggtaaagtcacgggtgaaatcccagacacgctggccgctcgttagatgcaattttagtcggtacttccctgcggctaagttttgcgtgcccaacgcgacttgatagttaaaccagctattcggtgccattgatcctgatttaagttgctgcgtggcaacggtttttcccgtcgtgcgttgaataacgcgtgcttgaattttgagttgtccaaaaagtgtcggcgtcagattacggagtttggcaaagagtactggttgcccattggtgggcgtcactttgacttcatcgaggactaacttaactggaatcgtcacttgcggctgacaccaaagcgccaccgctgtaacctctgcatagcgattcttcaacataaaaccttgactcgtcgttggccgggccgcattggcggttggattggtgacaaagaggccacctaacacctccccttggaacccagacttgggaatcgtggtcttaaaagccaccgttttcgcttgatgagccgctaacttaactacgacgccacttgacgtcatgtcagtaaacgtcgtcgtggcagatgggtcatgccgcttagacggcacgtacgcgacgctgcctgcatctgaggtcgttgcgttgaccggtgttacctgcaacgtaattgctgatttaccaggattgctgacggagactctgaacgttgacgtcgttcccggcgtgaccttcatattaaagtaacccgcctgcttatctagttgatccttgggcagtaggggtgtcagaataaaacccgatgcgggtgtgttagatgccgcttgaccaggtaatgaccctaaaagcccgcctagtagcaatgccaacactaataaccaccactgaccgatttgtttccatcgcattctaaacacccccacttcacttaatcattgaataacgacgcgcgatgatcagctgaacctatgaagctgcttttggtgttgctgcagctgctgctggtgcattttgaagcgtccagtaaagcgttgctgtgtaagttccagcagaaatattggactgcttaccgacttgcaatgaactgctcgtggcagtcgtcgctgtatttgaaccttcaccactatctgcagcagcattccataacgtttgtgggctcgcgacccatccgtttgtcacttcgctctgattcaaactcaatgcggtcggcgcggcagtattagcattgtcagcgttacccttggtcatattcaaattcaatgtggccgagtcaactttagccgctcccgaactaaacggtcccatcccaactgtcaacgtccagccagcatgatttccccgaaagtcgctaacgtttaaattgccactaccattgccatcatagccactgcctcccgacgtattgctacttgttgcatttaacgttgtggcagcagatgcaatattcttaacgttggtcgaacttaacgcgatatttggcacagcatccaacgttaattcaccgggcataaccgtgaattgtgcattcgataacgcttccgcattacccgtgctatccgcaacataaccagacgaaactgtcgtcaaattgttgcttgctgttccgggtccggccgctaacgccgctaggggcattagcgcaagtgatagtaaagttgcgccaccactcaacccggtcattaatttaaaagttcgcatgttgcttcctccttctcaatcgactgcttttccagtcgcctgctaccatattagtttactaatcactttatgattccgctttcaccgtcctcttcccctgacgccaaccatagtttatcatgtataccaatcgaaactgtgggttatgttttgattcattaactttccatattaattaaacgcctggtgataaccggccacaacgtggatacccagtcacccttgtaaccaaaaaaacatcaaggcccgttgtccttgatgtttttacatcattaattcatttatttttttaacgcttcatctaacgcaataacgcccttaactggaccaaccacagtaatcacatcatggagggccatcatatccgtcggcttgggcgagacatcaatgtgtttctcgtgtttgattgcaattaccgtcagaccaaaacgttgccggatctttaaatcgatcagattctgattaacaaagttcggatccgtaatctcgattgcggccaacgtatactcatcacttaagtcaataaagtttaaaatatggttggaaaggatgcggtgggcaatgccctgacccatatcacgttccggaaatacgacttggtcagcgccgacccgttcaaggacccgcccctggtcgctagtttcggccttggcgatgacctttttcgccccctgctccttgctcaacatcgtcgtcagaatactggcttccatattattgccaatcccaataatcacataatcaaacgtatcgacgttcaaatcacgcaacacctgctcgtcacgggtatcagcaatcattgtctgtgtcgccacgtccattagctcgttaactggttcttcgttaatatcaacggccaaaacatcctgatgagctgcggcaagagcccgaacaacactctcaccaaaccgtcctagaccaaatacagcaaaactttttcgcatgttgcccacctaaccaatcaaaatattttctgcaggataacggatcaagttcaccctagcttgacgtctggaaagcgcgtagagtgacgtgaagatccccacccggccaataaacattagcatcatgattacaatcttcccaatcaaagtcagattgggcgtcaatcccaaactgagtccgacggttccaaatgctgataacacttcaaacaaaacgtattccaacccgaagcccttcggaattttttcagtctgcgttaagatcagtgttgccactgtcagcacaatactagccaagaaaatcagcattagcgcccgattgatattctcctgactaaaacgacgatgactaaactcaacatcacggcgaccacgtagctgggcaatactttggaacatcaaaacgccaaacgttgtcgtcttgatcccacccgcagtcgatccaggcgtcccaccaacgaacatcagaatcataatgaccaataaactccccgcttgcaatccttgagtaggcattgtgattaaacccgctgtccggggggtaacacttaaaaacagcgtattgatcgttcggttgacccacgacattccggttggcaacagttccaagtcacgttcagtgatcaacaacaagacaaaaccgatgacaaataaactgaaagttgtgagtaaggtcagtttggaatttaaagtcagtcgcttacgcgtatggtacagcagcacgtcacgccaaactaaaaatccaaggccacccgcaataattaggatcatcgtgaccgtcaagacgtatggatcattacgaaagccttgcagactatcgccaaacacatcaaaaccggcattacaaaatgacataaccgcatggtatagtgacacatacaatccgtgacgccaaccaaatcgaggtacaaaatcaattgcgagcaacccaagaccgcctagctgaaagagcagtgacaaacccacgacatacttcataacgcttttagtatcactcaatcgttccaaattcagggaggccttgaccatcaactgcgtagagagaccgatctgacgacgcataatattaaagaggagtaccgcaaaggtcatgtagcccagcgcaccgacctccgaaagtaccagaatcaccaattgaccaaacgttgtccagtgcgcagcagtattgacgacggtcagcccagtaatacatgtcgctgatgccgacgtaaacaacacatcgatcaacgacgtgtgcacgtttgctggcgtcgcccatgggaggctcagtaagactgtcccaatcagaattaagataataaaaccggctaccattttcttagatagcgtatcaaaaaatttaaaatgtgctaattgtctcataatcattccatcccacaacagcttatcgattataaccaatcagtccgattgatcatactccatttagcttaatcaacctagtcaagaaaagcaagtccgacctaagctttgacgtacgccggccacggccgacccaatacatacaaaaaaaaccgctaatcaagctcagcttgatcagcggtaaaccaattacgaactaaacatactgtaagacgcgctcatcattataagcagcgtcaatcataccggaacctaagcattcctcaccgttgtagaagacaacggcctgtccaggagtaatcgcccgaactggatcatcaaaagtcacggtaacttccgtgtggtcatcattaaaatgcaccgtcacaccagaatctttttgccggtaacggaactttgccgtcacgtggaagtcattacctaagtcttcatcagtcacaaagtgtaaatcggacgcctttaagtgggtcgcgtacaggtgcggattatggtagcccttgccaacatacagaatattcttcttcaaatctttgccgaccacgaaccatggctcgttatcctcgccatcaccaccgataccaagtccgcggcgctggccgatcgtgtaatacatcagcccggcgtgctcacccttcacctgaccatcgaaagtcatcatcttaccgggcgttgctggtaagtaatggcctaggaattccttgaagttcttttcgccaatgaagcagatcccaacggagtccttcttcttagctgttgccaagcccgcgtttaaagcaagcttacgaacgtcaggcttcaccatttcgccaagtgggaacatcaccttttgtaaggtcttcgaatccagctgacttaagaaataagtttggtccttgttgctgtcaacaccacgcaaaaggtgcatcgtgccatcttcatcatgttgtaaccgcgcgtaatgaccagtggcaatgtaatccgcccctaaatccatcgcgtaatctaaaaacgccttaaacttaatttctttgttgcagataacatcggggttcggtgtgcggcccttcttgtattcgtctaagaagtacgtgaagacccggtcccaatattccttctcgaagttaatcgagtaataaggaatcccaattttatctgccactttggcaacatctttataatcttcggtcgcggtacagacaccattttcgtccgtatcgtcccaattcttcataaacacgcccaccacgtcataaccttgctgcttcaagagcaacgccactacggatgaatcaacaccaccactcatgccgacaacgacacgcgtgttactgtgatcagtcatacttttcaccatcatttccaaaagattctggagaatccacgatttgaaggtcgtacaagtccagtaagttccattataacaaagaaaacgccggctgcaagccaggcgttccctgattagtccgtcgtgaggacatcccgttcaataaagttagctaaaatataccgtaattgttcaacagcttccggatgggcgtcatttttgaaaatatttgcccgttggacaccattgcccgttaccgtcgtcatcttaaacccagtcaaatccgcattgactgtcatcttcagcttgaaagccgcttgatagggtgaagtgggatccaaggaacgttcaaaactaaacgcgcccgagcgacctttcacaaaacccaaatccatcaacgtgtatttcttgaccgttggactcagcgtatacgtcttagtatccccatctagtttaaccgttgttgtgtatgccatcgtcacgccccctgctttttaataagcgctgcgtcgtcttcgtcagcaccgttacaaactgatccagatcagccttagtagtatagcgaccaaagctcaaccgaatcgactcgctgatccggggagagtcttcaccatacattgcaattaaaacgtgtgatggttctaggctccccgccgtacatgcggagcccccagaaactgcgacaccacctaagtccaggttagtttgcattgtataggtcgatacccctttgatccataagttcaaaacgtgttgcaagttatgctcaccgagggacccgttgacttcaaaatcaactccgttagccgttaactggtcaacgatgtattgcttgaactcacgatacttagcctgccggtgggctttctcagcggtcgtcagttcttgcacggccgtggcaaagcccgcgattgccgggatattttcagtaccggcacggcgcttatcttcctgttcgccacccttgacaaagctaggaaagttaatgccattgcgtctgtacaagaagcccaagaatttaggcccattgattttatgtgctgaggtggacaacatgtcaatatgatcccgttgcacatcaatatccaacaacccgtaggcctgcactgcatccgtatggaaccatgcctggtgatcctttaacaattcaccaatttcatggattggcatctgtgaaccaacttcattattcccggtcatgattgagacgagaatcgtatcaggacgtagtgccgccttcaaatcatccagactaatttgtccctgttcattcacgggtaaataagtaatctcaaacccatgttctgccaaaaaagcagtcgatttaagaatcgcttgatgttcgattgccgtcgtaataatatgcttgcctaaatgttggcgcgtccacgcggtctgcatcaccgccgtattatcactttctgtaccaccactggtaaagataatgtcatcgtcagctgcgttaatgctttgggcaatcacgtgccgactatcgtctaaaacttcacgggcggcccgaccgaatgcgtgggtgcttgaggcattaccaaacgtattcgtcatttgatccgtcatcgtctgaataacggacgctgccattggggtcgttgccgcattgtctaggtacacttgcttcattacatcatacttccttctaaataattcttagttattagcatcgctgcgatacatctgactaattttgcgccgcaaataatgcaagtaacatcgctgcggactgcttacccgcttccaggataaattcgtcaaaactaacaccggcattttcatcaccgacatcggacatcgcgcgaatcaccacatatggcgtctggaactggtgacaagcttgaccaattgcggcgccctccatttcactagatagtgcttctggaaagtgtgctaaaatcttatcggtagccgccttacctgcgataaattggtcaccggaaacaatcagtccagtcttggcattcaaaccggttgccttggccgctgccatgatttgctttacccaattggcatccgtttcgtagtatagtggctgttgtggtaattgaccatattcgtagtcaaaggccgtcgcatcaacatcgtgataagcagttgccttagctacgacaacgtcaccgacatgcaaaccagcgccaatcccacctgcagaaccagagttgatgacaacgtccacatcaaagttagtaatcattaaagccgtagtcataccagcttgcactttaccaatgcctgattgcactaagacaacttcctgctgatcaattgtcccatcatagaacgtaatatccttaatattaacgatcttttcgtcttgcaaagcgtcccgtaacgttttaagttcttcttccatcgcacaaataattccaaatttcatgtgagcctagcgcctactttctatggtgttaaaaataaaattaaaaagacaataataatcccaacgactagtccagcaatcgcccaattcaatttgcgggctagccgtttcgtcttggcttcttcaacagcccggttgttctcagcagcatacgcttgtcgggatgcactgggttcagccgttggtgattcttgctcctgagtatcgtgaccagttggctggctacgttgttgtcgatattgctgtctggtgagtcgatcatcatctgccactatgcttcaactcctaactcagggtgactttgccagtaccaaatcgccattacggttttggcatcctgaatctgaccagtctgaacttgactgacagccgtcgcgaggtccagcttgatgagcctaatttgttcgtcagggtcttgtgggaatgccgttgcaaccgcactcagaccggtagcaacgtacaacttcattagttcgtccgtaaacccgggtgacgtgtagaattgggcgactgcttctaagtgctgagctgtcaatcgggtttcctcatttaattcgcggacggccgcctggtccatggtctcaccggattcgaccttaccagctggaatctcgacggtcagcccaccggttgcagcgcgccactgttgttcaacaatcattttatgttgcgcggtaatcatcagcatcgcgacggccggctgatgtcgcacaatttcacgtgttgccgtcgtttgatctggtaaagtgacttcttgtcgttcgacctgtaccaacccgccttgataaaccaactgacgactctgaacccgttcctcaaatgtcattgatcaagaacccctttcagtgtctgctctctcaataaggataccgattttttagctcgattgcaattttcaactgggcgatttcggtaattttaacgaacccgcaaaaaatgggctaacgagcgaccaatttggctccttaacccatttttccaattcttaaaatcaagcggaccaattgacactaatcgccattaggcctttgcaaggttagcgacgaaatcttcataagcaacctgctcaccagtttccgttgcggtagctgggctgtagtcgccctgaagcgcatcttctaatggcaaagtcacgatccggacgaacgtcgcgttaccgatcaattccatccagtattcttcatcggcaccttggtgaacaacggttttgaccatcccaccaggattggtgacgtggatttcttgattaaaatcggtactttcttggtgtaataacacgtacatcaatgaggaagccgacatcgcagtcccacaagcattggtaaaaccaaccccgcgttcaaacgtgcgtacaaaaattgaatttggtcctaagacttccacaaaactaacgttgacgccatcagggaaaatttggtttttaccatcattcatccattcaccgatacgtcctaattcggggccaaccaacgtatcatggtcaacgaacgcaatcaaatgcggattaggcaccgccacagctgagaatttcaagtcagcagacagcgctggaatcttttcattaataattgtcgtcgcatcgttattcgcatgcatgccaagtgtctgcgcgtcgaaagttacgggtgaaatttcaacactgtaagctgggacgtgggccgcaaaatcagcaacggcctgcacctttaagtccgcatacatcgtctgaacccggaagtcttcctgactattttgcgtgcccaaataacgagcaacggtccgtagcccattaccgcacatgctagcttccgtcccgtccgcattaatgacccgcatccgaccaagtacttgtggatgttctgatttatcaacaaccaacacgccatcagcgccatcgtacaaacctgcgccgtcacgtttacaaatgttaattgccaattgcttcaaatccgcatccgataacggtgcttgaaattgtgtttgatccaataaataaaaatcgttaccagaaccgtgtaccttgatcattttcacagccatcaacatcctatctatataaaatcgaccttaatttaaactacttcattatcatactgactttttcatgaaaattcaattgcaaaggaccatttctcataataaccattcaaagtcctgcgcagcaactgtaaattcttaatagctcttaaatcttgcatccgaaaaacgcaatcagttttttacagctgtatctcaatcatcccggtgttcggatttactgactacttgataatccccacacgccagcacaaaaaagtgccactaatcagtcccgttcgactgattagtggcacttttcataagttatcaagactcacgctaaatctaattcagattaagcttccaaaccagttgttactgattcagggtagttttcacgaacgattgcggcgcaccgtgcacataacatcggataagcctcgtcactgccaacatcggtcttaaccattcggcaacgatcacaaacgtcaccgtcagcatggccaaccttgatggctaacgtgtcaccaaatgtttctgcgtctgcaggcgcgtcacttaacgcgtgtagatctaatgctgaaaccatcaacatctgccgaacattggtgctcaaatgatctaagaaggcttgcgtatcatcatcaacatacaaatccaagtgtgcttccaaggatttaccaatcaacttagcatcccgggcttcttccaacgcctttaagacgttactccgaagatccatgaaccgcgtccattgagccatcaactcgtcgctgttcgcataattttgaacagctgacatctcagctaattgcgcaaattcttctggttccttcaagaatggccaaatttcttcagtcgtgtgtggcagcattggtgtgaagagcttcgtcaaggcaaccaaaacatcgtagaagaccgtttgcatcgaccgccgtgaatggctatcctcggcatcaatgtacataatatccttggcaatatcgagatagaagtttgataaatcaaccgtcaagaagttgatcaacttcttgtagatatccaagaaatcataatgatcgtaatgatccttcgtctcagctacgaattcgttcaaccgtgtttccatgtactggtccacacttgctaaatcttcataagccacgcggttggtcttcggatcaaagtctgcggtgttgcctaacatgaagcgtaccgtattccggaacttcttgtaggaatcggctacttgcttaaagctttccattgagacccgaacgtcggaactggtatccactgaagcgacccacatccgaacgatttcagcacccatctgcttaataacatcagctggcgcaatcgtgttgcccagtgacttactcatcttacgaccttgattatccaacgtgaaaccttgtgacaagacttgcttgtatggggcatgtccagaaacagccacactcgtaatcaagcttgagttgaaccaaccacgatattggtcagaaccttcaaggtataagtcggctggatagtcgaggtatgagcgctctgccaggacaccttggtgtgatgaaccagagtcgaaccaaacatccataatatcggtttccttagtaaaggtaccgtttggtgaatgttcattggtataaccatctggcaataggtcctttgcgtcgcgttcgaaccaaacattcgaaccatacttgccaaataaatcagctacgtggttaatcgtcacttcgtccatgatggcagtgccatcttcagcatagaagattggaagaggtacaccccaaactcgttgccgtgaaatgacccagtcaccacgatcacgaatcatgttgtaaagacgctttttaccccactctgggaagaattcaacgtcatccatcgacttaaggatttcatcacgcatatcaccaacggaagcaaaccactgtggcgttgcccggaagataatcggcttcttagtccgccagtcaaatggatagctgtgttcgtatggcatatatttcagtaataacccagcggccttcaacttgtccagtgcgatcttgttagcgtcatcgtagaagacccccgcaaaatcatcaccagcttcagccgttaagaaccctttgtcatctacgggagcaaagattggcaggtcgtattgcttaccgatccggtagtcatcttccccataaccaggcgcagtatgcactagcccagtcccagaatcaagtgtgacaaaatcacctaacatcgttactagatgccgactattgtcaaaaggatgttcgcacaaaatgttttcgagttccgcacccttgaccgttttaagcacttgaacatcttcccaaccaaatcgttcggcattttcgtccaacaattcagccgcgagcacaaacttacgattttcaccagccggttgcacaacgacgtaatcaaaacttgcatcgattgtgattccttctgaagctggaatcgtccaaggagttgttgtccaaacaaccatataggtatcatcatctaagacacccttaccatcaatgacatgttcaccgtagaaggcggatggcgatgtcacatcatgatattccacttcagcttctgccaaagccgattcagaagaccatgaccagaagacaggcttttggccccggtagatcaagtgacgtttagcaaacgcaccaaagacccgcacttgagccgcttcaaattctggctttaacgttaagtatgggttgtcccattcaccagcaacgcctaagcgcttaaactcatcacgttgacaatcaacttgttccaacgcgtatttccgacaaagttctcggaattcattgtccgtcatcttcttgcggtcataaccggcttgctttaacttctgttcgattggtagcccatgggtatcccaaccaggaacgtaaggtgcccgaaacccattcatcgacttatagcgaacgatgaaatccttcgtgatcttatttaaggcgtgccccatatggatatcaccattcgcgtatggtgggccatcgtgtaagataaagcttggcttaccttcattcaatttttgccgttgttcgtagactttattttcagcccacacattttgccgttcaacttctttgaccggtaagtttccacgcattttaaacttggtcttaccgaggtttaacgtttctttaacgcgcatattctcactccttaaaatttttatcaaacaatcgccattggatttttagacacaaaaaaacttcgtccacccagggacgaagttatcgtggtaccacccaattttagaattgtttaaattctctcttagcatggttaacgtccatggaccggccacccttactcaattcaggatagcattcggagatgatctgcaactaactaagggacgactgcctttccattgccggcagctctctgggcgtattagttaattgtttgctgttctcctcaatacattcaattcgcttcaattgtgcctgacgatcgcctaattaattattagtgctgtcatcatcagggaaaataaccaccgtctgttgttggacttgatcgccaccgtccgcaacgggggtctcaccactcgttgcttccgtaatttcaacggttgcttctgagtttacgctcgcatcccccgagttgtcaaggttatcttcctttaaaacgtgttgaatttcagcataatcagccgtattcgtttcgctaagtagttgatcccaatccttgctcttaaccacttctaactgcgattctaacatcacttgcaagcgttgccggaagacccgcgtttgtttcttcaaatcatcagtttcaacggataatcgtttggccttttgagaagcttcgtcgatcatttggtttgacttgtcggttgcttcactcacaatgtcagacgcttgtttctgagcttcgcgggtgataatgtcggcttccttcttagagttcgtcttcactttatcagcagcttcttgagccaccaagatagattgattcaaggaatctttcaattcattgaaatacttcaacttaccttcactcgagtccaaccgttcttggaggtctttattttgcttcaaggtaatttgataatctttgataatttgttctagaaaatcattaacctcatcaatattgtaaccacgcagtttcgttgaaaactctttgttatgaatgtcatcaggacttaacaccattagaattcctccaatatctatttactatgaataatatttaatgttattcgcagccgcgcttttttggtctcaccgctaatttcggcaagtcggacacgaccgtaatggttcacactcagcatatctaacaatgctaactcgtaatcagctttcggtaagtcagcccaattcagccgaaccttagcaccttcgatcaattccttggcgtgatgccgcgacaagttgaacgccgccttaatgatactatccgcacgtaatgaactaaccgtcgtagtaactgcctcccagtcgtcttccggtgtgatcaccgccgacaatggtaccgctgttaagtggactttcgtcttaccaaaacggtcgatttgctcctcgaaatagctggccatctcggtttcgcacacaaactgccatgtcgttccgtcagtcacgatgtcaccaaagacatcacgctcgacgccggcattggcaagcgtacccagaatttgaccatgctttaaggtggcaaacttcacgggataaacaatgttaaacagtgtgatttgaaaatcggccacttcaggttcgtaatacaccgggtaaaataagatccgttgtaactcagcaccttcaaagccaccggatgcccgcatccgcacgtcgtctaactggttgaccagcgtttgcgcaatgtagatttgtcgcgggttcaaaaacgcagttaagattggtcggtactgatcagctacttgccgtagccaaccagtgacctgttcaataaatggggcttcactatcgcgaaaatgttgttttaagttatcattcacgatactatcctcgttattttaatttagtatatcaataaagttatcagataaaataggccactttcagctaattggagcactaacagcgcaatgatcggcgaaaaatccagtccggcaattgcgggaataaagcgccgaaaaatactgagaaatggttcacagatttgacctaagaattggcccacgcgagtattataagctcccgggaaccatgacatcaaaatgtaaaccacaatggctaattggtacagttgaaacaaccgactaataatcgtcactaacaggccactcactccttataatttgctcgtatcaaactgacttgtcgtacttccggaaacctcgtaattttcaggaatacagaggaaaatttcatcaccaatccgttcgatctcaccattgatggcaaaaaccgtcccggtcaaaaaatccacaatccggcgtgccatttcatcatcgacgtgatcaaaattaatgattacagcttgatttttcaataactgcgtcgcaatttctttcacgtccgaataaattttcggttcgaatagggcaattttgctattcaccgacttgcccccttgcattggaactacctttggcgtgctccgagtattggttgcagattcagtgggagccgccgcttgggaagcttcggtgggttcctcatactgactgtcagaatcaccaacaccaaaaaagttactaatgaatccggccatgtgcttgcgctcccttcaccgttttacttacgccggcgcttgaagaatggtggtgtatctagcgaatcaccactgttatcatccttactatcgtcagcttgtgagttgtcattaaagacatcaaaatcagttttttcaacattgttaaactcttgaccattgttgactggccgtgaattgttcggttcgcgccgaatatcccaattaccgaatgggtcgttagcttgggactcacttgattgggccgcttcactcgtcgctggctggtcagttggcgttgcgaacatgccgcctcgttgctgactagcttcactacgactaggctggctgtccatcttgagttcgcgttgcttctgatcgataccagtggcaatcacggtcacccggacttcatcaccaagactttcatcgatcgaagtcccaaagataatgttaacatcagtcgttgccgcttgggaaacaatgtcagaagcagcttgggcttcatacaaggacatgtcggggccacccgtgatgttcagcaagacttgttcggcaccatcgattgaaacttccaataatggtgaagaaatggcttgtttagtcgcgtccgccgtccggttttcaccactagcagagccaatacccatcagagcggaaccttggttttgcatgaccgtcttaacgtcggcaaagtccaagttaacgtaccctggtgacgtgattaagtcagagataccttgaaccccttgacgtaacacattatcagcttcttggaaggcttccatcattggagtcttcttatcaacgatttcaagcaaacggttgttagcaataatgatcaacgtatcaacgttgtctttcatctgagcaattccttcagcagcgttacgagcacgcttaggaccttcaaatgtaaatggacgggtgacaacacccactgtcagcgcgccggagtccttagcaattttagccacaactggtgccgcaccattaccagtaccgccacccataccggccgttacaaagaccatatctgagccttgtaacgcttctgtcaaggcctcttcactttcctgcgcagccttggaaccaacatcaggattagaacctgcgcctaatccccgcgtaagctttggtccaagttgaattttagtttcggcatttgaagtttgtaatgcctgcacatcagtgttggcaacgatgaattcgacgcctttaacatcttcagcaatcatccggttaacggcgttaccaccaccgccaccgacaccgatgactttaatattagcccctgagttctgggttgaatctaaagaaaattccatgttttttcctccgtcatttctatccgatattaatcaaagaagtggttgaagaagcctttgacccgttcaacagttcccttatgatctggatcagcctgttcctgtggtgcttgtggcgcagactgtttcttagttgcttttttaggttgtgctgcgggttggctaggtgctggtgttgtatcagcaaattccaacgccacactggcacgagtatcaccggtaagtgcactcttaacgagtaacgtaacttcactcaaggccgcttgatatttgatgaccgctaacgcctcatcaaacgacggatgcctcaagcccatttgattaggcgtaaagacgcgaactcgcgttccaaaacgttgcgccgccaaatcagtgataccgggtaatgctgccaccccaccagttaaaacaatgcccccggggagctcgagcgcccgaatctcatccaagtgctgcttgaccttatcaaagatctggtctagacgagcctcaatgatttctgctaagtattgctcacttatttgctccggtgtactttgcccaacaacatcaactgggaaaagttcatcatccgaggcctgctgagcatcggcatagccataatcacgctttaacttctcggcattctcgatcgatgtattcaaaacgaccgagatatctttggtaatatactggccgccttcttggtcaacgtaagtatacttcaattggtgatcatgtataactgccgcagtcgtttgaccaccgcccatgtcaataatgatcgaaccaaaatcttgttcaccgtcattcagcactaaggaacttaatgccaagggcgcgatcacaatctgttcaatttgcagtccagccttttccaaagccttccgcgtattgtgaatgattgttttcggaccagtgaacagggtgccgtgcatttcaagccggaccccaaccatgccacgtgggtccttgatgccatcaaaaccatcgacgacaaattcatcggggatgacatccagtacttcccgctctggcggtaaactctgaactaacgcagccgccgcaacgttttgaacatcttcattattaatttctttggactcatctgccacggcaatcataccacgacagcgttcaattttaaccaggttagcgggaactcccgcaatcaccttttttatttcgatacttgctttttcttcagcttggcgtactgctgatcgaatcgtttcggccgccttatcaatatcgacgatcacgccacgacttaaaccattagaacgtgcgcttcccacaccaataacgttcatttgccctttaacacgttcagcaacaatgacttttattgaggtggtccctatatcaagtccgacataaattcctgaattatccataatagaggaacctcctagtattttacataaatattcaaggattcgctgacatatccagttattccttagtttaccatatcctaagcgcttttaaaaaggtcacacttagcattctatcaattattctgattcttgaacggataggagtatgcgcccacctcaagattgatgacacccttggttttcatcttcgccacaattcccggataataagccatcttgctagcaaaagtgctaattgttgcgtacacttcattaccgtcattcatgtaaagatgaacccgttcgggattagccttgttcggcgcaaacttgatctcagaaatattgtgtttgaccgccgatggtaacttagcgtactgtgcaatcatcgttgctaagcggtgaccgcttttaaagttggcatagatcggtgaaccgccaccgggttgagaataggtcgctttcaaaatcagcccattttccaaaattcgtcgatagtgttgaccagtcgataagtaacccgcgatgcgaatttccttaactgtcacccgaacactgttcaatccaactagcttagtcgtgaccttgccaatttgcggctgggcgcgttctgcgcgcttagtagtccgttgatcatgaccaatcacggaccataaggcaactccagggttgatcttagtcgccgtcttgacctgcgtaacagacaattgatcgttaccatgtacggtcaccgtctgaacatggctcagtggtgaaatgaagtaaccagccacaccagcaccgatcaggaaacagcccatcaagatcacgacccgtttgaaaagtaatcggcggcgctgagatttgagtttcggtaatttatcgccaattcgcaggcgtttacctgaccaactatggtgactcttttgcgctgcgcgatgattctcagccgcgtctcgttgaaatcgttcccagggtgtcagctgctcggggtgctcacgctccttgggctttttatgaaaaatggccatcacacccaccctttcactctagtctctgtactacttaatcaccgtttctaaaacgtgtagtaactggtcggccgcatcaggcatccccagttttttcgcattagccgccatcgtctcacgatgcgtggtactttggagaaggccatctaatgcagctaccaaactggttcccgtcaaatcagcttccttaatcagttcagccgcccccgcattcacgaggctttgtgcattcttggtctgatgatcattcgtaacgtatggactaggaactagaattgaaggaatccctaaagccgtaatttccgcaatactagttgcacctgctcgaccaagaataaccgcgacttctggtagaattgctggcatatttttgatgtatggttcgattttaacattcggagctagcgctgtcgctgacaagccattccgaatcttttcgtagtgtacctgaccggtgacgaacaaggtctgatagtcacgtttgttcagttcaggaattgccgcgaccgctgctgcgttaatgcgcgcagcaccccggctccccccaaaaatcaacgccgttggaatatcaggatccagatcaaactgcgccaaagcgccactttttttaatattagccacttgttgggctcgaggattcccagtcatcacaactttttgagcgggaaattgtgatcgcgcactctcaaatgaaatggcgattttatccacaaaccgacttaggaatttgttagtgacaccaacaactgaattctgttcatgaatgaccgttggaatgtgcatctggctcgccgcgaaaacgaccgcaccactcacgtagcccccggttccgaccacaatatctggtttaaacgccttaatgtacttacgcgccgtaaccacactctttaaaaacaaatagactgttttaacattttgtaatgacaatgaacgcttaaagccctggatcttgattgttttaaaatcgatcccccgttccggcacaatgcggctctctagtccacgatgggttcccacaaactgaacttgcgcttcgggatcatgtgcttttaaggcatcgatcagtgccagtgcgggatagatatgaccacctgtcccaccgccagaaatcattaatcgcattagttttcttccgcctttccagttaactgttcgattgctttaataaatcggtcgccccgcacttcgaagttcgggtactgatcccaactggcacaagccggcgataacatgatgatgtcaccagcctgactatgttgccaagcaattggcacagcagtctcacagttgtccgtaaactcaatatcttgaataccagccaaacgcccagcgtccgccattttttcagcagtctcaccgaagacgattaacgtcttgacatgcgcctttaatgcgggagcaagcttttcaaacgtattaccacggtccaaaccaccagcaagtaaaatgaccggctgatcaaagcccttcaaggccatctcggtcgacaccaagttggttgctttggaatcgttgtaaaattgccggtcctgatacgtctcgacatattgagtccggtgtcgaacacccgtaaacgtcttcaagacttgaacgattcctgctgttggaacggcttgaagtttagcaacagcaatcgctgctaacgcattttcaacattatgatcaccaggaatccggatatcagcagcatccatgatgtactcatctttaaagtacagcttgccggcctcttcataggcgccatctttcgtattggcttgccgtgaaaatggcacgacggttgcttgtgattgcttactgagttgccgccattcttcactatcccaattaatgactagataatcattagccgtttggttcatggtgattcgcatctttgccttgacatagttctcacgtgagccatggtaatccaaatgcgtcgaataaatattcgtaatcaccgcaatatgtgggtgcaaagtttgaataccacacaacataaaactcgaaagctcagtcaccattgtgtcggccgccgtagccttttgtgcaattgctgaggccggcacgccaatattgcctgctacgtaagctttaccggcatttgtgcgttgattaagcatcatcgtgatcatcgtcgttgtcgtggttttaccgttcgtccccgtcacaccaatcaactctcccgctaggatttgcgatgcaagttcaacttcggtaataactggaatacccttttcctgagccccactcacaattggatttgagtatggaatacccgggttcttgacaacaactttaaaatcttcatctagtagtgacagcgggtgaccacccgtgataactttgattccatcactcaataattcctgtgcatccgggttctcatcaaatttctttttatcattaacggtcacaaacgcacctaatttgtggagcaaccgtgcggcattgaccccgctctttgctaatccaagaaccaaaaccttttggttacgatactgctcaaccgacttcataaaccaagatctccctataatgtttgtagatgatacctaaattaacttgttatgtggctgatgcaccaactcgtggtcatcagcaaattattcatggtgagccagtgaccaattccacgacataatctgcggcagacaacgcaaccatttaaagaacaatcgttgcgttgataggaatcagtactatttacttgtcacttacttggcgaccaccaatgaataaagtcataccgcaaagaccaattatgtacaactaactcggacaagaatgcccgagttagcaaactgtgactaaataatcgtggcaacactgattacggctgccactaaaccgatcgaccaaaaaacgatatcaatcttccactcgctccaacccttcatctcaaagtgatggtgaattggactcatcaggaagatccgttttcccgttaacttgaacgaggcgacttggaggataactgaagccgtttcaatgacaaaaatgatgccaatcaagaggagggatagttcatgatgcaataagatcgatactgcagctaaagcaccaccgagcgctaatgatcccatgtcacccataaagatcttggccggtttgtgattatacacgaagaaacctaatagtgaccccacgacggccaaacagaataacatcacattatactgattttgagcgtaagcaatcacggcatacgcaccaaaggcaatcgtggcctgaccagcgactaatccgtccaacccatccgttaagttgacggcatttgagaagcccactaaccagatgatggcgaagagcatgtaccaaattcccagcgaccagacccccaaacctggaatcctaagtgccattggcaaatgttcatgttgatagaccaacgttaaaattactgccccaatgacttgaccaagtaatttttgccaagcctttaaaccttcgttttgtttacgccaaagcttgatactatcatcccaaaaaccaagtgcaccgtataagaccaggataaacatcaaaatccaggtggttggttgtagctgatgttgccacccaccgacccataacgtggtgactaagattgcgataatgaacagtaggccccccatagttggcgtcccagattttttctcatgccacttaggaccttcctcacgaatcatctgtccttctttgcgggcgcggaaataccgaataagtgacggcattaacgcaaacacaataataaaaccactaattagggttgcaccccacactaataaactcacaacaattctccattctaagacttgataactacttcagtgtcacactaattgcctgcttagcttcgatcggattacccgcagtcacactttgcgtcttgacgtaacccgtcccgctagtcgtgagcttaacgcccgtcaacgtcgcaaaatcagccacttcacttgccgaccatccagataagttcggcatatacatctgcccgttggcaaccagaatgacgcgttgaccacttgaaacgacagtgccagaagaaatggattgcttgacgacccgactacccttaccaacaacgaccacgtcaagtccctgcttcttagcagctttcttggccgcgctagtcgacttactcgtcaaatctttcattttgatcgtcgtcgctttagtctcactcgctttttgttcttccaatgcccgtttcatcacggtatcaaaaatctctgccatgtcatctgacgcggaacttccgttaagtgtcggttgtttcatcgtaatgtacataatgtacttcggatttttagctggcgccatcccgacgaccgagtacagataggtgttgtcaccttgctcatacgtactcccgttgctgacctgggcagtcccagtcttagcagcaatgcgatacccgctgatcttatatgatgagccagtaccgtatgacttatataccacatcttgcatatgatccaacaccttgctggcagtcttcgaactgattggctggcttacaaccttcttcttacccgtataaaccgttttgttggtgttagggttagtgatcttggagataaagtacggctgtaacatcttaccatgattagcaatcgctgtgaatccacgaagcatctgcatagcggtcacctgaatcccctgaccaaaggccgtatccgcttgttcgattggatacgtaaattgaattgaaccactctgctcgttgtcaagaccactattagtactctcacgcaacccaaagcgtttaatgtacttcagccaagtcttggcccccattgcttgttctaggtgggccatcgccgtgttacttgaaagggcaaaccccttagcataggtaatattgccccacccgctcgtattccaatcaggaacggtattattaccgatcttatattcaccggttgggacggttacattagcattgtacttaccgctgtcgatcgccgctgccattgtaaagaccttcatcgtcgatcctggttcatacgtgtcttcaaccaacaaattacgccacattttagatagtccggtctttgtttgcgcattaaatgtcggtcgctgcgtcgtcgccagaatggcaccagtcttcgcgttcatcaacgttgctgtcattgacttaggtgagaccttagcgtttacttgtgaaactttagtttccagtaatgtctgtaacttactatcgatggtggtataaatattatccccatccttaaccttcttaccagtctcagtgctaccttgatatccgctcttcgtaatcgtcttgcgaccatcggttcccgataactgcttgttaaaagccaactcgatgcccatcgaccccgttaaccgcgtctgatcggtatccttctgactcttggaggtggtcagcccaaccaagtgggaagcaaacgtgccgtttgggtagagccgcgcttcagattcaataaagtgcagcccagccacattttgggcatcgatcttttccttagtcgtcagtgaaatattcttaccagccgtcccaaattcaatttggaacttacctgcgcctttttgcaaggtcgcgagggctttcttatagctgattggcaaatacttcgataagacacgcgccgccttcgcattatttttaacatacagtgccttgccactagcactttgctgatttttcgccataatggcgtagaccgtgtacgtgctagtatcttcagcgattgggtcaccgttggccgtataaatagtcccacgtttggccgtgatggtctggtcttccgtataaagtttcttggtggcctcgaccagattgaccccgttgacgtggcgcacaatcgcgatatatgaaaaacgaatgatcaaaacaccaaagacggcaatcgcgccaaaaaatagccattggccaaaaattctacgattttgttttggtgaccgtttcgaagtcattcgttgtttgttcttattcatttgtaaacattccttatgctaccgttgttcagcgataacccgtactgcttagcaattttatttaaacggctccgacttgaaagttcactgatttcttgtgcggccgacgtattttttgcctgcacttttgtgactttcgtttgcaccgtctgtaactgactttgtgcgttactcgttgcaatgttcgttgaaactaacataatggctaatccaaacaccaccaaactcaaaccaacacacaatactttttcaaataatgaaaaagcaactcgctgcgtcttgatggacggattcggggtcacaacggtttttgttttatgtaccggggtggttgcgccaggagtttgctgtggcaactcccgcgctaatccattttgggccattttaatcactcctttaattattcctgaatattatttattcgttatctttaaacgttcgatggctcgtaacttggcgctgcgagcacgacgattagcttcgatttccgcatcgctaggcacgaccggtttacgactgactaagcggtaatctggttgcatttcagctgggataactggtaaaccaggtggcagctccggcaaatcgctgtgctccttaaagatcgtcttgacgagacgatcttctaacgattggaatgtgatgacactgacacgaccatgaacattgattaaatcaatcgcttgttcgagcgaagtctccagtacgcccaattcgttattcaccgcaattcgaatagcctggaaaacccgtttagcgggatgaccacccgttcgccgcgctcttgctggaatggcattcttaataatttcgaccaattgccccgtcgtcacgatcggctgaaccgcccgttcacgctcaatcaaccgtgcgacttgtttagaaaacttctcctcaccatagcgatagaaaatacgaaccaagtccgcatagggccaagtattgacaactgtttgagcagttaatttctgactctgatccatccgcatatctaacggcgcatcatgttgatacgagaagccgcgggcagcatcatcaaattgtggcgacgaaacgccgagatcataaactaccccgtcaacgtggtcaaggccccgagcatctagttcagtcttcaagttggcaaagttacttttgatgaacgtgacctgaccacgttcaagataagtcgctaagttactttggttataatcgattgcggtttgatcctggtcaaagctatacaagtggccttccggacctaactgttgcaaaatttcacgagaatgaccaccgccacctaacgtacagtccacgtagatgccatccggccggacgtttaacgcggcgattgcttcatgcaaaagtaccgttgtgtgttcaaatgttgccacgcgtgcgcccccttcctaaattattattgttatttaaaaatcaatcaagttttctgcaagatcatcgaagttcgctgcggtctccgtctcaaactgttgccagtgttcggcaccccagatttcaaatcggtcagaaactccgacgatcacacattgcttttccaactttgcatattgtctcaaggttgcaggtatcatgacccgtccctgtttgtctaattcacattcagcagcagcagcatagaaaaaacggacaaacgctcgcgcatccttgcgagttagtggtaaatcatctaactgtgcttgaagcgttgcccaccgttcagcgggatagccaaaaatacaaccatccatcccacgagtaatgacaaacgaagtgcccaatagctcacgaaacttggcaggaatgattagtcgccctttcgcatctaaggcatgttcaaactctccgaaaaacatcttagacgccacggccaatcaacccctttcattaaacataattcaagtctaccacacccccccacttcctaccacatcgttttgttacttttccaaattgttaacaaaatatcaaaaaaagtcccacctaacgttagtttcgttaggtgggacttagtgggggacatttttacgatgttaaaaagaagtggctgccaagtgctaggatatagacgacgagtgtcaataattccgctccccgccaatagagcttaaaaaagcgccagtaaaggatttctccgcgttcaacagcttcaatcagtgttaaaccgatccccaaaatcattagggacaacacttcgtacggtgccagcgaactatccgttgcttgcagtgtcagaaagtgggtgaaaacaattaaaaatggcggccaaaaatccaacaatcttaatccatgtggccaaacgcggtgtgcaacccgtttagcacctaaaatgatcatcgagatggcggctaaaaataccagctgcccataccaagtggtccataaatctcgcatatgcgtacttgcctccccattagtgtcgggttaaattatagagattatcgttaaacttttcaatcatctgtgacagccctataataaacataaactattactggagggatgaccgttgttacaatactttaccactggtaaaaatggccttttgactacgccgaacgaccatcacgatcagccatactggatcaacgttgaacgcccgacctcaactgaaatcgaccaactggtcacacaatttgatcttcccaaagattacttaactgccatcctcgacgatgcggaggtttcacgagccgagcaattatcaaccacgcaatccagtcaaccaatcttaatcgtgatgcagtatcccaaactcacgacgagtaagctggggtaccttgaatttcaagtctatcccttcgccttgattttagtggatcaagtggtcatcaccgtcagtaattacccggctagttttattcaagactttgtgatggacccggcctcgtctaagctaagtctggataatcacgaagattttgtgctgactatcatgtggtacatcgagcacagttttgtgaccgcactcgaattgatcaaccaacggacaagcgccctggaaagccgtttgaaccaagctactcacaacgtggaactctttaccattatggcttaccaaaaatccttgattcgttttaaggccgcccttaatcagaacacacccacgcttgacgcggttgaaacttcgatcacccatttcaacgcacctaatcaccaatcactcaccgatgatattaagattgagacccagcaagcgagtgacatggctgaaacgaccaatcagattttgcagcaatatagtcaattagtgggttcagtaatttccaataatttgaatgatgtcatgaaatttctgacctcactcacgatggtgttgacgattccaacgattatcggtggaatctatggcatgaacgtcaaattacctggtgccggtctcgtccacgctttcacttggctgatgctaggaacgattattctttgcattattagtatcgaatatttacgaaaccatgactatttttaatttcaattgaaaaaaaactgattccacgttaaactatgaaagaattactcgtaaagtgtggtgcatacaaacataatgaagaaaaaatcaacttttcaaaaaattacgatggtcgttatctggttaatgatcatttctaccattgggtcattggtgcttaccgccttatctgggttaggtttactaaccttctaggttaaacaccttgcgaaccacgaatggttgcaatacttaccaagaaaaaagttacgcttgctcacaacaagcgtaactttttttattactggtggatcactcagccatggtcggcaagcctagccaccaacttctgagacaatgtgaattaaaaaaatcacgcatttgtctctgaaaaaggttccaaccattagtcaaatctggctaacgattggaacctttactttaacgtcgattattcaatcgtatcggcagcgccaccatgtgaagtcatgccattcaaatgatgcccaccagtcttactggacgctaagcgtcattacccgacgcgggcgcttcgtcagccgatttttggcggtaaaccttacgtggcttactcccctccgaagggcccaccacgccgcgttcctccatttcgtcgacgatccgtgctgcccggttatacccgatacggaagcgtcgttggagcatcgagacactggcggactgttgatcagtcaccaattcaacggcttcggcataatactcatcctcaccgtcacgagggtccccactaccagcggcatccgtctcgtcatccttgaccagcatactatcgtcataatcagccgtctgttgggctttgataaagttgacaacttcttcaacatcatggtcagaaatataagcaccctgcacgcgcagtggcttattcatgcccattggctgatacagcatgtccccacgaccaagtagcttttcagcaccgttactatcaataattgtccgcgaatccgtcccacttgaaacggcaaatgccatccgtgacggtacattggctttaattaatccggtaataacatctaccgacggccgttgtgttgccaagatcatatgaataccggccgcccgggccatttgacccaagcgaataatggcatcctccacttcgctcgaagtgaccatcattaaatcggctaattcatcgacgaccaccacaatgtatggtaagacgggccgtgactgcccatcagccgcattttgttgacggatatattggttgtacccctgcatgttacgctgcttggaatccgcgaacaattcatagcgtcgctccatctcggcaacgaccttatgcaacgcccgggccgccttcttcggttccgtgactacgggcgtcaacagatgtggaatcccattgtaaacccctaattcaacctttttagggtcaatcagcataaacttaacttgacttggtttcgtgttcatcagtagccccgtgatcatcacgttaatggcaaccgacttcccactcccagttgaaccagcaatcagtaggtgcggcattttagacaagtcggcaacgactaaattaccagaaacatcacggccgagcggtacggccaacggtttggtcgggtgcgctggttgggcctcaacgatatcccgaaatgacactgttgaaatctgtttatttggcacttcgattccaatcaatgatttaccgggaatgggcgcttcgattcgaagatccttcgctgccagcgccaacgctaagtcgtccgctaaattgacgaccttgctgaccttgaccccaacagctggatgtaactcatacttcgttacggatggccctaagctgacattcttcacttcaacttgaacaccgaaactcgccaacgtggttgttagcttctgcgagttactctcaatcgttgcgtactcagcactctgatccgtttttggaatcttcgtcaatagtgttgactctggcaactggtagtccgcatcatccatcacttcagtcccttggagttcttgttcatgatcaaccgtagcagctgaagttggggattttatgggcgaggcttcacgatcactagccaccgtgatattcaagtcggcaggcgagctcgtaactgcactggctgctgagtccggcgccgaagtcccgctcgttgtctcagcaggggctgctgactgtggtacggttgacgttggctgcttctcagtacttgccgcttgattggcgcgcacttgttggtgaacccgccaacgggcaatttgaacccggagcacgtgcgtcagccattcataaccggatcgcagttgctggcccaattgcatcaaggcctgacgcaacgcttgcatcgtcttatggaacggcaaatcaaaggtaatgtagatactggcaaccatcaggatcagtgcgatcaaaattgtcccgacattagccaatagtggataagtgacactatagccagcagcgccgactaatccgccaccaagattactggccatgccccccttggcaaaatcatttttgatcagattccacgtcaacgaccaaaaatcggcatggtgattcaattgattaaacatcgggatctctaatagcaataagtaactgaagaaaaacaagttaccaccgacccaccaccgccaagtcagtcgtggccaccgaccaaaaatcatcaaatatcccatgacgaggagtgttagcccggcaaaaatctggtaggcattcccagcaatggctcggaaaaactctgcgaataccatgcccactaaccccaccttcaataaggcgagaatcgtgaccaatagtccaatcaggccaatgacattccccgtcatctgccgcttagccgcaaccgtcggcttcttcttgcgcgtcgaggtccggcgcttttttgttgttgcttgtctacgcgccacgcttcgttcatcctttctcaattaatactgtcttcattataacaaactcaagttcccccgtccccatcaaaaaacgcaccctaacgtttagcgctagtgcacgttctgttggttacttcaacttatcattttcatagtggtgcgaccgttcaaggtttgggaattgttgttgccgcagggcttcataaatcacaatcgcagccgaattcgataaattcaaggctcgaatatgtgaatcatcttggggaatccgaatggccttttcgggatatttgcgcataaatggttctggtaaccccgtcgtttccttaccaaataagaaatagtgatccttacccgtatcactataatcaacatccgtatagtcatgttcagcaaacttagacactaagtacaactgatttaaatcaggaatactagctaaaaaatcttgcaagtcagcatgataagtaatatcgacactatcccagtagtccaagccagcccgttttaagtgcttatcatcaattttgaagcccaacggttcaatcagatgcaaggccgtatccgttccggcacacgtcctggcaatattaccagtattcgctggcattaacggttcaaataacgcaatgtgatttgtcaaaataatcgtcctcattcatattagtctctacgccatgttcattcatagcaatcctattaatcataccatgtctatggttcaacagcgaactttgaaactaaaaaacgctttgttcgcattcttaaccaatctttcctatactaatcaccgtacgcgccggagggcggaacaggacgcacactggctgacgaacaccaatctaaacctgacacgttgtcatcatgattcatgccggattaacacgtacaaggcagcattcgaatcattttataactcgaggaggaattatctatgaaaattatgattattggcgcaaccggaatggctggctcagccatcaccaaactagcacttgaacggaaccacaccgtcgtggccatcggacgttctgaagaaaagctagccgctctaccggctaacccaaatttgcagaccaaagctaaagacgctttcgatctcacactatctgagctacaggcggttgacgtggtcattgacgcaatggcgactagtcctgataaggcttaccgacacgtggatctggcaactaagctgattgctcagctccgcgaacaacagcggccacgtctcctcttcatcttaggggccggtagtttaacaactggtgatgatcaacacctcttcgtgcacgacattgaaagtaatcccgccaatgctgccttcgtcgctattccgcaaaaccaactggccgaactgaccttcttacgaaccgtcaccaacgtcgattgggttggaatttccccggccgccaatttcacagcaggtcctgctaccccggcccagtacggccatgacacattactgacgaacactactggtgaatcagtgaccaatagtggcacgatggcggtagccgttttaaacgaactggaaacgcccaaacatcatcaagaacgctttacagtcgctaaccagtaaacgtcttgcctagcagcgctaaaatatcgagtggcagccaaaccacaagccgagcgctacttgagcaatttagttaactgtgacgcgctttaaataagaccaattaatcccgccagaatctgacgggatttttgtggcgtcgcaattgctggcagtatttaacagctaagtgctgccaccgccccatctctcctcattgcgacagtcgtagccaacattgtcactaaccagttggttgcattacaccgccagttaacgccctcaccgacctttaattaattcttcaccaaagcatgctaaactattgccatgattatttgaaagtggggataccatgaataaccgtttatcaggacggaatttactcttcatcggcaccatgttatttggactatttttcggtgctggtaacttgatttttccaatttttctgggccagcaagccggccaacacgttggtgcggccattatcggactattgatcaccgggattggacttccattactaggcgtgatcggcatggggctgacgcgcagtcagggcgtatttgacctggcaacaaacgttagccgatcatacgcgtatgtcttcaccgtactgctttactttaccctcgggccactttttgcaatgccacgattagcaactacggcctttcagattggactggcccccttcttaaccaccaaattacaacccgtggtgctattgggcttctccgttgcttttttcgtcgtcacttggttactggctcgtaatcccggtaagattatgacctatgttggtaagtggctgacacccatctttttgctattattaggtgccttaatgcttgtcgctatcattaagccactgggatcacttaacgtcgcggcgagtggcgcctatgtcagccatccagttctaactggttttactgaaggctacaacacgatggatgcgttagcctcgctagcttttggcatcgtcgtgattgatgtgattcgcgacctcggtgtccgtgatccggggcaaatcgcaactgataccattaaagcaggcctaatcagcatgagtttaatggcagtcatctatggtctgctggcgattatgggtaccatgagcttaggtcgcttttctccagctgccaatggggggattaccttagctcaaattgccgatgcctactttggccgattcggtaatgttttactagctctaattgtcatcatcgcttgcttaaaaactgccattggcctcacttctgctttcggtgatacgttgcatggcatgtttcctaagatttcctaccattggctgatcaccatcgcttgtctcattccagccattcttgctaacgttgggctaactgaaatgattacttattcaaccccagtgctgatgtttctctacccgctcgcaatcgtgttaatcatactggcagtactggcaccatggcttgggatgtcccgctggttatatggaatgacaactgtctggaccatgattccggccattcttgccggcattaacgctatgccatccgcctgggtacaagcatcctggttgcaagctttgcttcatctcaacgcgtggctaccgcttgccaatctagggttaggctggagtgtacccgcactgctaggttttggtttagggtggttgatcagccgtaaacaaccatctgcttctaaattgcattaatatagcgtcacatataaaatagcggaccttctgatagccatccacgacttttcagaaggtccgctttaaattacgagagccatgccaattgactggttgccattgaacctcaccggtgaatcatggcattattcaggactggtatgaatgcaatagcaacacatggtcacacctcaccgtcagcttttgaagacacaaaaaaacgtagtatttcggtgtgggcacggcgaaacgctacgttaatgaagtacaactcggtagtcaccaacgacatgtcgatgttaactaccaaacgatttctcaaaggttatcttaacaccggcgtttcaatcatgcaagcacccgcgctaacctttttgcatcgttaataaactcacatcaacggtaatcttagttaacctctgccgtttagcggttgcgagctgctcagcatccgcaccccagtgcagcggtgtcatgactaataagtcgttaaagtcaatgttatcaagcgcaacttggtattgaattcgttgccgcttagcagtgggatagtgctgggcaaacagatctaacacccgttgattatcatactgatactgtcgatcagtcggtttaaatagtaaatgacgcagttcaactaagtactcaggatttggcacgatcttcaataactgtccaccgggcgcaaggacccgttcaaactcttggtaagcggatggtgagaagacatccataatggccgtgaatgccccatcggtaaagggtaattgggccaaatcggccacacaataataagcagtcgtcgtcaattgggtcgctaagttaaccccatccttactaatgtcaaaaccaatccccacgtcttcagaattggcatgcattgtcaacaaatcagctaggggggtgccttcaccgctaccaatatctaagattcgttgcgccgtttttggcaatgccgcattaatggcttggacaatggggccgaaaaaaccagcttgcaaaactcggcgccgcgctgccagcatgttagcatcgtactcgctagcgacttgatgcgttagaaaatacaacgtccctttttttgaaaaatctacttgatgcccattaggacaacataagctgtggccgtcaattgtcacgtatgcttgattacaaactaagcatcgaaagcgatcgatatttgcctgaacaaactggatgccgcggtcaatttttttcacaggtgtcaccttaccttggttaattttatcattaggcgtcccatatccaagcgatgctttccagcttacctgaaactatggattcacgatgacaacatcgtgtaaaggacgtatgttcaatcataccatatcggggcggacaaaatagtagctgttacgatttaggtgtggtatcttattaactgttctaaaggctgacttaaattgtcaaaatgaatttgctaccgaatggcatgaatttaatgacataaaggagactcattcagatggcaaagaaatcaaaaattgcgaaagaaaaacgcatcgaagcaaccgtggctaagtatgccgaacgacgccaagcacttaaagctgctggcaactataccgaattggcaaaattaccacgtaatgcttcacccgtgcgtattcatcggcgcgactcacttgacggtcgaccacatgcttacctacgtaagttcggcatgtcgcgccttaactttcgtcgcttagcgcacgctggtcaaattccaggtgttaaaaaagcaagctggtaaagtgacaactggcgtgatattcactaatgattagtaacatcaccattcagttaaattaaaaaggttccacagaattgtcatcagacttctgtggaacctttttaatttggcgttattggtttaatcgcgtttcagcgccatctgagtagccaacaattaccttacttgttagtttgatcagttgatggggttgcttcagcctcatacaatcccgaagaccgtcgataccagtcaaacagatgtgtccacaaaactttcaagatcgcatagcctggaatcccgaaaataacccccatcaacccgaagattttaccagccgctaataggacgactaaaatcgtaatcggatgaatagctaagctactccctaagactaacggtgagataaagcggccttcaatcgtttgttcaatgacgaagacaatcagaacttggaccaacatccatggtgaggtgactaacgcaatgaccactgaaggcaccattgcgagaaaagaccctaaatatggaatcaaatttaagattccagccgcaattcccaacgtcagcgcaaatttcaagccaataatactgtaaccaaccgcaaacatcacggcaacaaagaacgccacggtcaattgaccacgaatataattactgacctgtgaattgatttctgtcaaaacttctaagaatcctgagcgcgctttggtaggtacaaacttagccatatacttcggtagttgatgaccatcgcgcaataggtaaaaaagaataaacggcattgttatcaacccaatgatgacggtcgttacggtactaaatacgcctgtaagtgaagtcaccgtcccggtcaaatacttcgaaaagcggccactcactagcttactgagatccgtgttccaactttcaagttggtcacggatactactgagttgcggatcattgagccagcgattaacttcagtactggcatttttccaataattgggccagtcattgataattgataaagtttgatcgcgaatcgttgggataatcgcaataatgcctaacgccaacagcgcgacaaccacaataaacaaaccaatgatcgtccaggttcgtcgtacgcgaaaacgcttttctagccagtcaacaagtggattaagcaagtagtacagcacaccggccaaaataatcggcaaacccacgatgctaaaaaattgccggaccggatctaatagccaatcgacttgcttgcccataaagaagatcgtcaatactaataaaataacgaccaaaatccgaatgagccgttgcgctgaccaccgttgtttctgtgaatcaggtttcaaacaatccctccttcctaagcctgatacgtaataacgctaccgaccttgattgttggtaactggtttggtgtcaaataaatgccgttttccattggtttggcaggtactggtttgaagtacaacgtcgcgtgcccaattgacgttaaattagcttccactagtccccctgcaaaggccaccgtataagtttgtcgatcgatcgtaatggtgctaccagcaactaacgacagactcgcgatgggctgctcaaatttctgaatcaccgcgatttgctgtaatggtgccgtggccgtttcatcgaataaaactaaaattggttccttggaatcgatagcattcgcaccaatcgattgtactgttgcagttattgtcatattgagacccccatcggttaattaattgctttaattgtagcatagtcctaatcacagacgccaatttgtcatcgcttacacgggccatatctatgctatacttgaattatctatcaaggaggtttgttatcatgcaagaacgcattttattcggaacatatacgaaaaaaacaagccaagggatttaccaaggaacccttgacaccactgccaaaaccttaaccaacgatggcttactggcagccactcaaaatcccacctatttggccctctcagctaaggattgcctatacagtgtcgataaggaagatgacgagggcggtatcgctgcttggcaaatcgacgggcaaactgctcacaaactaaacaccgttgtcgcacctggcaccccaccagcttacgttgctgtcgatgaggcccggcaactcgtctacagtgccaactatcataagggaacggccgaagtcatgaaaattgctgctgatggcgcgctgactttgaccgatactgttcaacatagtggccatggccctcgtcctgaacaagacggctcccatattcattacaccgacctcacgccagataatcgcttagccgtaatcgatttaggtagcgataaggtctatgtctataacgtcagcgacgccggtcagttaagtgaacaatccctgctcactatggaagctggctttggaccacgtcacctcgtgttcagtccagacggccaatacgccttcttagctggtgaattatcgagtcagattgcgagcttaaaatatgacgcccaaactggtgcctttacgcagcttggcattgtgaagaccattcctgccgactacacggcgcacaacggtgccgcagccatccgcttaagtcacgacggtcattttctctacgtctccaatcgtggctacaatacgttagctgtctttgcagtaaccgccgacggtcatttgaccctgattcagcaaatcagtacggaaggtgacttcccccgtgattttgatttagatccaactgaagcctttgtcgtggtcgttaatcaaaacactgataatgccactttgtatgcacgcgacttaacgagtggtaaactaagtctattacaaaaggacgttactgtgcctgaaggcgtttgcgtccgtttctagtaaaggatgaaactcatgttattaaaagaagtctgtgttgaaaattacactaacattcccgcagccattgcggccggtgccaatcggatcgaactcaacgataacctatccgttggcggtacaacggtcagtcgtggtgtaatgtctgaggcagccaagtataccagtgaacatcacgtgcccctagtgaccatgattcgcccccgtggtggcaatttcgtttataatgatacggaattaaaaatcatggaagcggacctgctacaggctcaatcattaggtgttgatggtgtcgcatttggtgctttgactgcggataatcagcttgacgaagaagccttagcgttattaattggtgcagccggtggcatgtcgatcaccttccacatggcttttgacgccatccctgaaaatcaacaagccgcggcaattgactggttagtagaccatgacgtcgatcgcattttgacacatggcggcccacttgatcagccgattactgactgtgtcccccacttgcaaacgacgatcaaacaggccgctggccgaattcagatcctacctggtggtggcattaccactgccaatgtcgccgacatcaccacaacactcggcgtcaaacaggcccatgggaccaagattattaattactaagaactgccaaaaaggcgcatctcattttttgagatgcgccttttgattggcgaagtaaactaaaaaattagaccattaatcacggttattcaatggtctaatattggcacaagcgcccgcactaagccaacttgccctgagccctcttccgcgaacaaattggtcattgtcaacgctgatcaattggctcgtgttcatcatcaatcatgctaattaggataaacataaaacagaccaaatcttaatggtcactttatgaattggcacgttgattatgaataattaaacggttaagatcagccggtaatggtgcaaaggtcgtgagggtctggctaatgaatggatcatcaaattccagttgcatgcagtgcagtgcttggcgctgaatccacgggtcacgaggaccgccataaagggcatcaccgatcaatggatgaccgctagctgcaaagtgcacccgaatctgatgcgttcggccggtatgcagccgtacccggacgactgtcatgttacgcagccgcttaaccacccagtactcggttaaagacggcttaccgtcgggacgggtcgttcgtttgataaatgaatcagcggcacgaccaatgggcgcatctagccacccgtggtcagtcgtcaattcaccactgacgacggctaagtacattttgcgcatcgcatgggccttcaattgatgatcaataatcgaatgggcaaaatggtgcttagcgaagagaacgataccgctcgtatcccgatccaaacgcgtggtgatatgcacaacctcattatcataatgggccgcttgataataaccttttacccgattcgctaaggtattgtcaggtaaggcatgcgccggtactgaggccactcctgctggtttattcacaatcaggtagtcacgatcctcatataagatatcgatcggcaacgtcgagacgcctaagtggtcattaccaatttcagcaggtgtgaccatcgtcacagtctcaccgcctgtcagcatatgaatcgctaataccggtcgttcatcaacgagaattgccccaccatgaaacttaacttttttcaacaaactacgtgtcacaccatgttgtgccaagagtgtcttaactttcatcgggttcgtctcatggttgatccaagtaaacctcattgctcgtccaacccgatgaaggatgtcccgacccgttgccagaagcgattatgacgatgctgagcaaatgcaattcgacgattagcaattgaataacgaatttgttcaattggccgcggctgcgtatccatttgatcagctgtaaagacaaagtgtgactgctgttgtggccgaatcgttattgtttcatacggcgctacgatgactggcgagcctaatgttcggaagactcggttgttgatcgacgcaatctcggccatttgtaaagcgtccaagcgcggatgaatgacagcaccaccaactgacttattataagccgtcgaaccagttggagtggagacgcataacccatcgccacgaaaacgttcaaatagttcatcttgaatataaacatcggtaaccatggtactcccaagcttcttaagcgttgactcgttcaacgccaaataatgatcagtcgcatccgtatccgcataagtaatatctacagctagcaagggataggtcacactctggccgttgtcttccagtaaaccgttgatcagttggtcgatttcataatctcgccagtccgtatagaagcctaaatggccagtatgcacgccaacaaagcgaacttggtcaaccatgtgactatagtggtgaaacgccgctaaaagcgtcccatcgcctcctaccgacaaaacaatgtctgggtgctcatcatcaatttcaaacccggcagccagcagtttagtatgtaactcacccgctactttcttggtcttggcactcgcatttgcaaaaatcgttactttcatgaattttgatcttcctttgtcgtgtcaggctcatcgttgcccggccccttcccatacgagaacaagctctgagcttcttgaatttcctcacgaatttctgacatttctttatccaaactaaaggcggcttccgcagcccgttgtaatcgttgactcaagttttcagggaaatccccttgatatttatagttaagcgaatgttcaatggtcgcccagaaattcatggcaagtgtccggacttggatttcggccaaaattttcttttcaccaccgaccatttggaccggatattcaatcacgatatgatacgaacggtaaccagatggcttttcattactaatgtaatcgcgttcttccagaattgtcatatccgtccgttttcgcaataaatcaacgacctgatagatatcctcaacgaattgacacataatccgcaaaccagcaatatcctgcatatcttgttctaggcgatcttcttgtactttacgtcgggtcatcttttccttaatgctatcaacgggtttgacccgccccgttacaaattcaatcggttcatgctgattcaaatcacgaaattgtttgcgcattccccgcaatttaactttaagctcatcaacggcttgctgataaggcagtaaaaaatgattccaatcttccatcggggcacctccgtttcaatccataccctaaaattttaccataaatcgtcggaataaaaagttaacgttctcgagactgaaccctaagttcactttttttccaaactgtaatcctagaaacaaaatactttacgaatttagcaaatcggtgcatgattacgggtgaaggtttaagctaagtaacgagtgattttctgcattaaaaaatttatgaaatgaaaaacttgcaaatacctcgtttgattggtattctgcactatgacgcgaatagagaaagtggaggaattataacgtgttagaagtgtatttatttgtaaatccgttggcaaaccaatgcgtacgtgatgagcaaaacgtgttacggttggcaaacgactcagacaagcaaatccaatttcaattcgtaccattactcaatattaatgtgattcaacgggctctaaagtgccaaggaatcaaggcatccgactggcatgctcaaaatcaacagtctcaaacattgtaccgagttattttggattataaagccgccctttttcaaggcaaaaaacgggggcgtaactttttaattgccttgcaatctgcaatgctcaaggctggtcaacactattcggaagagctcgtcaaaacggttgcaactaactgtcagattgacttagacatgttcatggaagatcgggacagtgacttggcgaaacaggcctttcatgctgatcagcggcttgcatctgaaatgaacattaccgaagcatcgtcggccgtcgtttttgattgcgaccaatatgattatggtgtcttgctagaacattttaattacacgactctttttgacttagtcaatggcaatctggatccttttcaagatgcaactcgggcaactaatgccagctgtgctagccttgccaacgcacaattacacgttttataattccagtaattgcaattattcaactggtcctaccagtcaaaagcacccgacgatcattttcgccgggtgcttttgactgtatttaccttttatagctgccagaataagccttctggactcggcagctaacaccctaactgataagcgggtcaggtctaaaataagcgtcgggaccgaacatcctgacgctcattgtgcttgcttttataactggttaatcttgggtgaccaactgttcaaattcatttaatcgttcttcaaatacctcgaaagctgcatcaagataatcaggcttggtcatatcaactccagctcggtgcatgacatcgattgggaaagcagatgaaccagctttcaagtaaccgagataatccgcaacagcatctgtctgttgcgtactaatacggtcagccaacgttgaggccgctgcaaaacccgtggcatactgataaacataataattgtaataaaaatgcgggatacgggaccattcgtcggcaatttgcggatcactgacgacggcgtcaccatagtagcgttggttcaactgcaaataatgttttgacaagcgatcggcagtcaaagcctgaccttcttgatcttgctcatgaagccactgttcaaactcagcaaattgcgtctgccggaaaacggtgcctttaaatccatctaagtagtaattcaagacatacgcccgcatttttggatcttgttcagtcgctaagaaatagttcgtcaacaagttttcattagtcgttgatgcaatttccgccacgaaaattgaatagtcaccatactgataaggctgatgatgtgtcgtgaagtaagagtgcatactgtgtcccatttcgtgcaccaacgtatataaattatcaatattatcctgccagttcaacagcatgtatggcgcggtatcatacattcctgacgaatacgccccgctacgtttgccttgattttccaccacatcaatccaccgtgaagcaaacgctgttttgacgtgtttgagataatcaggacccaaaattttgagcgcttgtaaagcagttgcttgagcctgctggtaggaatagttggtcgtcggcttgggtgccaatggcgtgtacatatcatacatatgcaactgatcaactccgagcagttgtttccgtaacgcaacataccggtgcaataagtccaaatgcttgtcaacggacgtgactaaagaatcgtaaaccgccgtcggaatctgattggcagcaagtgctgccgtccgcgcatctggataatgatgagcctgggcaacaaaattgtgtaccttgacttggctagctaaagtcgaagcaagtgttcgccggaactggccgtatactttatacagtgcttcaaacgcctctcgccgaacagccggatgaacggactcaagtaacaccccataaattccttgtgacaatttgacagggttgccgtcgtcatcctttaccgttggaaattgaaagtcagcgttattcagtacaccaaaagttttcgcagaagcaccaaaaatatcactagcgcctgcgagtaaagcttcttcgctttcagacagaacgtgtcccttttgcaaccggatcgtatccaacaaatgccgataatcacgtaaatcgacgttttcatcaaggtacgtatccaattggcccggcgttaattccaagattgctggttcgaaccaggcagtcgctgcggataccttggcagtcaaactactagcttgatcgtctaaagccgcattggtactattgccagtatcctggtcacttttcagacttgcgtataccgccactttctctaaccgacgatacagcgctaaaacagcctggatgccagccagcaccgtgtcggccgagcttgtaaacgtttctttaagcgcagtgacggtggggattgcagctttgacttgtgcaatatccgcctcatacgcggcctgatctgcataaatgggcgtcaaatcccacgtcagttcttcaggaacggccgaacgggtcggcaattgtttggttactaccatgcaaattcctccaattatttcaatatagcactagattaccacagattgcgcctatcgcggtagcatctgttccggaatcaatgtttgcgccatcgaagctggccggaattcacatgccactcagttttctgccagtttatcacttgctgctcgctaagcatcgtaatcatggtcgttatcagttgttgtattaacgtgcctcgtgcttgcaggcaggcacgccgggcaagtaatggccgtaattgggcccagatcaatgcctctaattgtggcccagtaagccgtccggactgttgccgcagtgcaaaaaagacgtgggcgtgccagaccagatatggtcccgataacagcggtagttgcggcacagtgggcatcgtccacgtcggtaactgggcaatcgttcccccgcgttgatagcaagccacttgtaacgcatcaaaaccacgttgatgtcgaagccgtgccaacattagctgttgataataatgccgtaaatgcgtgtccggcaaagttggggtgttaatttttggagccaattggcgaaaatgtaacaccgactggctgcgcgtatccagtcgaatcgtttgataggtcagcggttccgtatccaatgtcaagacgtgatgcaataaacgaacactagtactttgagtgtccaaaaaaagtagaaacaggccccaccgttgctggtactgcaaaaacttcaaagccttgctattgaggtgcaattgtcgctgataggggcgtcccaacaaccataacacttgatagccatgctgacgatagccctgcgtccgagctgcgagtcgctccactgacaagggtgaacactgaaattctaacgcgagtggttgcgctgtacctcgtcgaaccaagatatccgggcgctgatgtatctctggcaaaccagcctctaagcgcaccgtataaccactggcagcgaaccaggtcgctaattgttgtttaccacgaagatggtccgttgtttccccttcagagaaagcatcacaatccgtggcatggacgtgggcaaaatgtggcacgatcactgccccccgtttcaatcgcaccggctgcacacatcctggacagtaatattctatttggcgatcagccgtcgccgcattaacgagttgatgctgggcatccatcgcgatcaacatgatggtccctcctttcaacaactaattacgtcattaaagccaattctcacgtaaacccatcatcatttattgaccccgagcagcacccgtcttttggcaaagcgtccggcaggcagattgtttatccgtggatacaaaaaagccttaacattacgaataaacgttatgttgaggcaattaactgctatttaaaatagtgccggatggtttccaaagcagcattagacatgatcttttcaccatgttcaagtagtacgtcagctgaaatattagctaaatgggcatattccaaggctactgcgacatcatctttgatagtggccgttgatgattgatcgacaaagaaaaccagttctagataatattggtcgcgatacttgaataagttagacgcgagtccctctggccggaataattgtgccaatgaaacaagatcctcaaattgatcgaatttcaacacgtattccttagttggtgtatcaggatcatccaaatacggatcgagatcattagtgtccttagttggattatgtgcaataccttgtccatcttcaacctgattcgtatccgtctgcatcagtttacgcttcaaataatctgaaacatcatcttgtgagtcgctatcatccgattggtcgggtgactgagttgctttagcaatcgtatcttgtaaattatcactgtttttgctaataaataattctaaaccatttcggtttggtaatacttggaaagttacggcatcattgtcctgaaattgatgatcaacatcaacttcctccaagatgctatagaagaaactttcaatttgcttatgattccctagtaaatctagtacgcgaataccgcgttcattgagatcatcattttcaataacgacgcgaatcgtatcttcgttgatgcgttccatctccattacagatccacccctttctaagtgtcaagggccataatcactatcacaattctaacttatttcagtttattgtaaagtaatctatctgaaaatacaaaaattggccaattagttaagctaactagccaatgataatcacatatttgctaattgttgtgcccgtaataattctaatgtccgaattttgcgtggcaagaagcggcgaatctcgtcctcattgtaaccaacttgcagccgcttctcatcaagcataattggtcgacgtaacagactaggatcatgagtaatcatgtcaaacaattcattgagtgacaaatcattaatatcaacgttcagttgttgaaaggcctttgagcgagtggaaataatttcttccgtccctgattcagtcagttgtaggatctgcttgattttttcaattgaaagcggttcggtaaacagattgtgttcttgaaaatcaatgtcgtgtgtctgtaaccaagccttggctttgcgacatgaggtacaacttggtgcggtatataaaataaccatcctgggtcctccttggcatcgttaatcaattttataacataattcattatacgctactcacttttaattgtgaataggtttaacaaaattaattcatttaaaactaataatctaaaatacaattattcgatatatgtattttttctattgaataaaccgcttttatagtcattcttgttattaattaattcgtatacaatttaattatgacttatgatatcaataatctattaacggtaaactgacagaaaaagcttagcaaaatgatttgctaagccctatcatactagccaagattcaattgtaaaaacttttgagcaactgtcacttgaatgtcattaccggcggctgcttgtgcttcttgttggagttgtgtaaatgagacatcttgtggcaagtgtgtgagcaataattttttgacgcgggcatatttggcaattttaccagactgtgccgacgtcatatgccacattttaccagttttatctgcggcaaaattcgtatcagtcatcaataactgtgccccggctgcgaaagtcgctaattctggcaaataagccgtatcggcggaaaagacaagttcttgccccgtcgctcgctcgaccaacttaacggcataggctggaactggatgtttagtcggtaaaaagctcacatcaaacggcccaatctgattgacagcagccggatcataggcccgaccttctgtggcattcgcccaggtcaaggcaccaaagttaagtggatcagcggtgtgcccgtaaatcggcagcacgggcgtcttccgttcaccagcacgcaactgccagtaatattgtaagaccccaacgtccgccgtatgatcgtgatgataatgagttaggagcacactatcgagctgtaaggggtctaaaatctcttctaaggcgtttagcgccccagacccacaatcgagcaataaatggtaatcaccggctgtaatcaggtaagaactcgtacccacgccatcgtatggataaccaccatagtaaccaagaactgttagtttcattattgaccatcccttcatttctctgtccacttctattttaatatagcaccaagaaaaaatgaaaccaacaacttaacatattttcaattattttgaaaaacacgtataataatagatgtaataaataaggagtgatattgatgagtggaaagattgcagcaacatttgggacacgtaaaattctaaccatgatccaacaacaaaatgctgatcgtgacttgttattaatgcaggccaacgccactgaagatcgctatatgctactcgatttaaccggcgaaaaaaccgttttttcaagccccgtaacgtatgacgttttactttcaaaaggatcagctgactggcatggaatgacaagtttcatcttcattgatttaccggaagaagaacaaaaagtctttaaatctaagtttagtagtttccgacacgattataataagccagatgggctgaaacatttttggatcttacgtgagtccaaaaataattcagccttcgtgattgtcacaaattggcatagcgactccgaatatgctgtttggctgcgaagcgcttcattcaagccatttgccaagtacatcacctcagattacggctaccacgaaagtcgctattcatttgtacgttcattaaaatcataatcatccggtattggatatttcaagtcgctgcagtgattgaactgcaacgacttttttcatgaatattacttttactcaacactgctaaatctcatcagttgatatataagcctcgttcacaacatcacattgcagtcagaaccaacatatgtcccgatcagtgtgatcctaaagaatctgccgtcagctttagttgagcaatcgtgagcccaatcagccatctgttgaatgacacccaccctatttactgattacagtgcgcacctctttaggtgatctcgtcaaacagttaatattctgaaaacacaaaaaaacgtcattcatcaacgaatgacgtttgtgacggtccgtacgagactcgaactcgtgatctcctgcgtgacaggcaggcgtcctaaaccaactagaccaacggaccaattgcgggagcagggtttgaacctgcgaccttcgggttatgagcccgacgagctaccagactgctccatcccgcgataatataatgacccctacgggattcgaacccatgttactgccgtgaaagggcagtgtcttaaaccacttgaccaaggggtcatatttttaaatggtacaacggagaaggagggattcgaaccctcgcaccgcttgcgcgatctatacccttagcaggggcacctcttcagccacttgagtacttctccaaaatgggcctaaatggacttgaaccatcgacctcacgcttatcaggcgtgcgctctaaaccagctgagctataggcccaaaaaaagcgggtaacgagaatcggactcgcgacaacagcttggaaggctgtggttttaccactaaactatacccgcagaatacagatatggcgcgggacggaatcgaaccgccgacacatggagcttcaatccattgctctaccgactgagctaccgagccattgtagccatttagaactattaacttaacggtccgtacgagactcgaactcgtgatctcctgcgtgacaggcaggcgtcctaaaccaactagaccaacggaccaaattgcgggagcagggtttgaacctgcgaccttcgggttatgagcccgacgagctaccagactgctccatcccgcgataataaggaggatgagagattcgaactctcgcgtggtttgacccacctgacggttttcaagaccgttcccttcagccagacttgggtaatcctccatatgatgtaactaggaaatgtccactattaatagtagatggaccttgtagggctcgaacctacgaccggacggttatgagccgtctgctctaaccaactgagctaaaggtccaagctctaattcctatcgcggcagggggaatcgaaccctcgacctcccgggtatgaaccggacgctctagccagctgagctacaccgcgatgtgttaaataatcgtatatgactacttaatcgggaaaacaggattcgaacctgcgaccccctggtcccaaaccaggtgctctaccaagctgagctatttcccgttatatgcacccagtaggagtcgaacctacaaccttctgattcgtagtcagacactctatccaattgcgctatgggtgcttcataaaagtgccgaggaccgggatcgaaccggtacggttatcactaaccgcaggattttaagtcctgtgcgtctgccaattccgccaccccggcaacactttggaacaaagcggaagacgggattcgaacccgcgacccccaccatggcaaggtgatgttctaccactgaactacttccgcataactattcagttaatgccgactagaggattcgaacctccgaccccctgtttacaagacagatgctctgccagctgagctaagtcggcatgacgattaacacaactataacatcatatcatgctcagttacataaatcaacaataacttttgtgaaactatttaattatgagccgtgaacacggtgtggtcacaaagattggggtctcaccagtcgaggagagtaaagcgactttttatgaagtgacagcggccgttccgattacagccgatcaggcacagttactgcgctacgggatgattgggcaaacggcgattattacgggcaaggtgacttggtttgattattataaagataaggtgctggataataattgatggtggtccatcagtactaactgactaaatatcactgtggtaaagtaaagttatctagaagcacatatatcatacgaaagaggtaagtaatggcacactcaaataaacaattcatcattaacctagtcattgccagtctaatcagcttagcattggtgagctttagtatggcaccggcgtatcttttcctaattaagaataattggttcatgatcacgattggttttgtaatctatgccttggaagcttgggggctatattggctttattggcatacagcacgagttaggcattaccaagtcgcgacgttgaagtcccgggtgaacattgcacaattaggaactgtgattattgcgatgctgacaatggtcgtgctcattattgttgatcttaaattgagcgcgatgctaaatattcccgagaccagcaattccaggtcgttggcatggatgctcggtgaagcaccgcttcccatgattgtttcggtcgtgatattttcccccatctgtgaggaattgatttttcgcggtatctttttcagctacgcgttaacgaatcagtataatcaccgtaattatcagatgatcgcggttgttattaatagcttaatatttgcaagtgtccatgttgatgcaaattgggagccgtggatttattatacgttaatggggggcatcttggggacaacttatttgttggctaagcgcgatattagaatgaatattctggtgcacatggggactaatttggcagttttcgcgttggcggctatgagttaatgttgtggataaaaaattaaaacataagaattggtttatccacaggggataacttgggaggcttggtatggttgctcgattgatcagggtatttggttatgtgttagcgggtttagggctatttatattcattcaattaccggtgttagcggatggctattggaattggtggggtgaacgcccgcaacaaatcaacgtcggttatcattggggagcattagtcgttttaaccgttggtgttgcggtcgtactagtacgttgctatcaccattattttgagatgccagtcctgttagggtatttttcttggtcaatgatggggctgactgctttagtggcagtggtggtcgtggtgattcaaatggggataagtggtctgctagtcagtccaaccgaaacacaaaatgatgaaatcatggcactgatccacagtccattggggttattaacattagtgtgcacaaacatcgttagccccgtactcgaagaattacttttccgtggaattgttcaaaatacgctgcgacgatacttgccagtattgggcgcgattatgctgacaaacgcagtattcgcactcggccatggttatcagttagccagtacggtgggcatcttcattacaggatgcggtttttcatggttagtactcaaaacaaaacaactgagtaccgcaatgggatgtcatatactggtgaactggctggtcacacttattaacatgatgtggggataagtttcagttagtgatatccggtcaaaccgcaagttgtggattagttaccattggggataattatcaggaaatggatgtgaaggagcatggtacatcaaaacgtcaaatttattggtagattactacttgccagtttattggcagcaatcgtgatggggcttagtacggcgcccatcgatattttaacactcaagtataactggataacggtggcgatcttcttggtcgtctacctgtttgcaatttatttattctatcgaatttatctggaatcagttactaataatcattttaagattacgaaaatagttgctaagccgagcgcgcgtcaattagtgattacggtactggcaatggtggtcatgctgattttggcagcggtgcaagttaaatttgttagtgatgctgtctatccaatcgcggagaatgttgctgacttgcaaacattgtctcagcgctcaccgatattgatggcgttggccctgggtgtttttgcaccgatttgcgaggaattaattattcgcggcaatttcttcagttatgcgctggcggaacgttttgatcagccacgctaccaactagttaccgttattgttaacggcgtgttgtttggtctactgcgtggcggttttagttgggtgcagttgtcatactatacggttatgggtctcgtactcgcggcaacctacatattatctggccgggatattcgagttaacagtgtcgtgcacgtcacagctaatctgggcctcatgctaatggcatgaggccagatggacttggcaagtaacttgagtgggttgatttaaaagcccgttagtgaacattctagttacggttgtttggatggagtggatgaaatgttacagaagaatttacggtttattggtaatttactaattgtgagtgtgttgagtgtcattattgtcaatatcagttccttacccgtgtatatttatttgattacggccaattggtttacactgttagttagcttcagtttatatgccgtgattatcgttttcttgtacaacatctataagacgaccgcggaattacggcaatttgattttcgaccgtggcgaacgcggctaaataaacgggccttgctattcatgatgatcggcgcagtcattatcgtggcgcttgcttttggctatgctaagctgacggcggtatggcacatcactgaatcgggtaatgaacgttcattggatttactgttgcggaaaaatccggtagcgatgacactcgatgccgtcatttttggaccaatcgctgaggagctgagtttcaggggctttttctttagttacgtcttgtcagaccaatatcttgaccgggagtaccaagcagctaccattgttatcaatgggcttcttttcggttatctgcatagcggaaatagcttggtgccattagcatattacacgctgttcggcatggtgctggggaccatctacctattatctaagcatgatattcgtgtgaatagcgtgacacatatgttagcaaatctggggatactctggttggttcctagctaaaataggggtcgtactagtcgggtactcagatgaattggatatttgggtgtggtcagctaataataggagcaagagtcggatggattgagatatacacgtgatacgggtataatcgattaagaattttgcagataaggaaactcacaaggtttaccaacaaaaattctctaaacaattgccaccaaccattcagcgattagcattgcgaaaattactaatgattgatcatgcggaaacaattaatgatttgagcctaccgcctgccaatcacttggaaaaattaagtcatgatcgccaagggcaatatagcatcaggattaataatcagtatcggatatgttttgcaattcgaaatggtaatgagtttagttttatgatgttgaaatagtcgattatcatcatggttaggagaccaaaaaatgaatgaaatcccaacacctaaaattagtgaaattcttgaagaagagtttatggctcccttgcatatctctgcatattttttggctcaacagattggggtacccacgtcacggattcaagacttactacatgatcgtcgacaggtgacggttgatacatcgctgcggctaggacgattctttggagtgtcggatcgttatttcttggaacttcaaaatgatattgaaattcgtaatttgaaacagatacatggtgctgaatatgcacagataaaaaagtatcaagtcagttaaataaggacgtagaccgtagttgcttggtagcgtactacggtttttgcaaatataacctaaactgataagcagcagatcttaaattttaaggttatcaacaggtggataaagcagtggcgtttgtattatccacctgttgataatcattgagttggctaattgcactttcactactgggttaactggtcgtgagaaaaatggtcaagcattagtttcgtgataacgaaaaacgactggaagtagctagcgtaataccgctgggctacttccagtcgtttttttattacagttatactcgtacctgatgttcaatcgtaaataatgtcgggtccaattgggtaattagtggggagacatcaccgatgctgagcaatgtcaagtggtgcatcgctcgtgacgcaatcgtgtataagatgccaactgaatccgcatcgggataattggtagcggagacatcgtatgcgaccaccgcgtcaaattctaacccctttgcaaggtagattggcataacaatcacgccttgtggcatggtacggtcgctatcggccatcaacgttgttactgtatagcgcttcaggtattggtagacctgcttgctttctgctaaatctttagttagtacggcaacggtgttagttgccttgagctgatgttcaacttcgctacgcagactgctgagagcggcgtcttcgccatagcgaatcatgaccttaggtaaatcgcctttacgtgtgaacgcttgaatctggtcgccgtcgggtaatagcgctttagcaaagttcgtaatctgttcggtcgaacggtagctcttattcaacgtaatcaagttcgcccgtcggacattgaaagcatccttgaggcgttccagtaattgctgtggtaactcaatccccttgaataatgcttgttcactgtcacctaacagtgtgaacttagctagtgggaacgcgtgcttgatatataacagttgtgctagcgaatagtcttgcatctcatcgacaaagatatattgcatccgccggttctgaccactgccagttaggacatcgcgtaataacaatagtggcgcgcagtcaaccagagcaatccgatggtactcaacggcggcctggtaagcggcaattcgttgttgccattggtcaggcgtcacggtggtgggccgatcaacttgcgctaagaaatcgttatattgttcataggtgtctaagaagtaaccattatagatcgcatcgtagacttgccgcagtcgtttggtcacgatttgcttaccaatatagaagacttcatcgtcgagtgattgaaaatcaccgcggcgcttggaacctaataagtcgtggtaagcttcgtcgctcaattggtcaatgatatcattgacccagtcagcttgggcttcatcgtcaatgcgatgctttaagcgtttaattaaagtgttcttgattgctaggaaacggtcagctggttgcatcgctgctggtaaggccgtcgcaatctttgtaatgacctctttagcgaagaagatttcgccattaaagacgatgttggtgaagcgtaattggtcggctggtagctgatggcaatattgatcgacttggcgcataaagtcggcgctttcttgaaaatcgcgaattgccggtgtcagttgttcacgctggcggtcactttcgtagcgctcaaagaggctttcaacggttaggccttgaaaacgtgcactgagaaattcggcaagcgtgacttgacgcatattgcgctcccctaaactaggtaagacttcggagatgtagtgactgaataagcggttgggcgagaataataccatttggtccgcttctagggaagcccgtgagtggtagagcagaaaagcgatccgttgtaaaatggcggacgtctttccagagccggcaaccccttggacaactagtaagtcactagtggtgtcacgaataatatcgttctgttctttttgaatggttgctacaatattttgcatgtaggcatcattttgttctccaaggacggcctgcaagatttcgtcaccgaccgtttcattcgtgtcgaacatattcttgatctgaccatgattaatctggaattggcgtttcttgatcagctcggtcgtctgctgcccggccggtgtttggtactggacctgacccagagtaccattgtagtagactgaggaaatcggggcgcgccagtcgtaaactaagaaattctgttcagcgtcgacaaatgaggcggtgccaatgtataaacgttcggcttcctcgtcgggactatcttgaatatcaatgcgcccaaaatagggtgagttactgagatctttcaagacaccgacttgccgtttcaagatggcttcggattccacggcgcgttcaaccatttgcttttgttgttgcagttccgcgttcgtttcaatccggtcatcgacttcaaacgtgttgacggaattattatcaccatagtttttctgaatgacatcggtttcgtgatgagcctttgccagcaagtcgtcggtctgttgtgcccgttctttaacttgctcgatgactcgatcaacccgttgttgttcgcgttgttgctcttgatctgatgttgccacgtagagggcctcccgtctgataatcgtctaaatcgcttgaacaattttaggcgggtttagggatgatgtcaatcaaagcgcctgcaaattcactgatttatcagtaattgttgtgaaatgtgattatgagtggcactaaggcgtgctagccaacggtgggcaagttcggcagccttacgatggcaaggctgaaacttgcaacctatgactatttattctaatatgattttaatcattctaataaagtgggtggaacgaatgcgtgtcgcactagcacaacttaatattcagtttggaaatccggatgccaactacgagcagattgaagtggccattcaacgggcagctgagcaaactgtcgacgtgatcgtcttaccggagatgtggaataccggttatgcgttaactcgcctgaatgtcttggcggatgatgatgggcagcgaacgttacaattactcagcaagttagctcggcagtttcgcgtcaacattgtcggtggctcagtcgcggtcgctcgcgatgggcattactataatgagatgttagtcgtcgatcgtcagggacagttactgagtcgttacgataaagtccaccggtttgggttaatggcggaagaccgttatattaccgctggtgagaccgagaacgtttttgaactcgacggaactgttgcgatgggggcgatttgttatgacattcgtttcccagaatggcttcgtaaacaagcagcccgtggcccccaagtgatttttgtcagtgctgagtggccgacagtgcggcagatgcaatggcggctattactgcaagcacgtgcgattgaaaatcaagcattcgtggttgcggttaaccgcgttggcagtgatcctgataatcaatttggtggtcagtcactagttattgacccgctcggccaaattgtggctatcggtggtgcccatgcccagttgattacggccgagcttgatttaacacaagttgaccaggttcgtggtcagattccagtgtttgaagaccggcgcccggaattatactgaagcgtaaattggggactggggctgggagcacttaactgaattttaatggtgttgaaggaacgcccgcttgaatttcgatgggcttaaacgtcgaaatgacggtcggtatgatgaaatggtagcggctagttaacgcgaatgatgcccagaatttattttgacacggtcaggtataaccagtacactagaactaattaatcgttgaagaaaagaacagtaaggcgtccaataacagagacctagcacgtgctgaaagctggggcggactaatgaattggctttttggagattcggtgaacaccggggacccacccttatcggtcaatgagtggcagagacaagctttctgcaatttaggtggtaccacggtgatgcgtcctaattaactagtattagttgatcaggcgcttttttagtgccaatagaaaggatgagtacaatgacaaaaaaagtgattttaacgggtgatcgccccactggtaagctgcatatcgggcactatgtcggttcattacgtaaccgggtcgcattacaagattctggggactatgattcatacattatgattgcggataaccaggcgttgacggataatgcgcatgatcccgaaaagattcgtaaaagtttattacaagttgcgatggactacttggcagtgggaatcgatccccaaaagtcaacgatcttagtccagtctcaaattccagcattaactgacatgatgaatcaatacttgaacttagtgacggtagcgcgcttgaatcgtaacccaaccgtgaagacggaaatcaagcaaaaagcttttggtgaaagtgttcctgccggtttctttgtttatccagtcagtcaggccgctgatattacggctttcaaggcgacgaccgttcccgttggtgacgatcaagaaccaatgctcgaacagacccgtgaaatcgtacggagcttcaataagacttaccaaactgatacgttggtcgaacctgaaggctacttcccaccaaagggcttgggccgaatccctggacttgacggcaatgccaaaatgagtaaatcactaggaaatgcaatttacctttctgacgatgctgatactttgaagaagaaagtcatgtccatgtataccgatcctgatcatattcatatggaagatccgggtaaggtcgaaggtaacgtggtcttcacgtatcttgatatttttgatgaagacaaggccaaggtcgcagacttgaaggccgcctaccaacatggtggcttgggtgacgttaagattaaacgctacttgatggacgtgttggacggtgtattgcggccaatccgcgaacggcgtgcaatttacgaagctgatccagctcaagtcttacaaattttgaaggatggtacagcgaaagcgaacgtggtcgctgaccaaacgtggcgtgaaatgcaagacgccattggaattaattattttaaataaattatggtagaaaatagtgcaactgaccgtcggatgtgtgaagacggtgagttgcacttttttgtagacccttaatatatggggctttccggtaaattaataacgatggcccaacgcatcacggttgcgaattaaaaagaaaaggcagactaaattgaaaattaggctgatttcgtttgctttcttacatgaatgattgtaaaaaagtgcttgttaaaataagtttttggcaagaaaaggggtggtaaggaattcgaaagcgcttgctgtggctgcctttagtcataatataaattcattggtataaaattacgaaaaataaagcgttttcatgtattctgtgataatataatttgtgggcacaagttttacaagcacctactaatttatcgaaaggaggtttagtcatgtatcaggcaattgcgcaggcaatcattaaatcgataatggcggatgaatatccgactaagttaccaaccgaaaaagtgttaatggcgcagtacaacgccagtcgcaatacgattcgtaaagcgattgatgtggtcttccggcatgggttgttacgtcgcgtgcaggggagcggcaattttattatcaaacaaccgcagaacacgaagaaagtgctcaacttatcgattggatttgaccagtccgccatggttgagggtggaccattagtatcaaaagttgtcacgtttgataaagtgacagcggatgaaactttagcacaacaggggaacattgcgcttggtgacgaggtttatcgggtggtgcgattacgttatttgaatgacatcttgtatgacctggaagagtcttattttccgcgaacggtcgtcccgttcttatcgagtgagagcgtgcagcattcaatcttcgccttcttgcgagaggcatatggtattacggggagcaccacggaaaactacgtccatcaagtgcgggtggacgcgcaacgggcggagttgatcggttgcccagatggtgacaaaacgttgtgcttggaagcaatcaattacttggctaatgggacggtctttaacttctccaggacgttcttcgtctatccagatttggaactctattaccataccgaaaatattgatttacaaaactagtacgggggtgacgcaacagttgtgttgggtcactaactagcgaaaacctacattaggagtgaggggtatattatgaattcatttatcgaatggcttaacaaacacttagtgccagttgcggccaagattggtgcagttcggtggttgatcgcattacgtgacgcgtttatagcaattatgccggcaatgatggccgggtcgatcgccacggttctgaacgctttagttcgagatattccaacgaagttcggttggatgggcattgttaattcgatgcagtggttgattggaattaatgcgatggtttggacggggacgttagccatcttaggtctgattttctcatttacatttgggtatcaattggcaatccagtacaaagttgaaccagttactggtgggatcgtgacacttggaactttcatcatgagtttgccacaaaactttaccggcacgttgacgagtacgttgagcaagggcgctactaagattttgacggactctggcatggcggttgctggcaaaaaagtgacggcttggggttacttcaacttcaacacgtactttggttcgtatggtttctttacggtcatgattttaggggccattgcaagtgccgtttacattgctttgatgaagaaacacattacaatcaagatgccagattctgtgccaccggcagttgcaaacgccttcactggggttatcccagccgccgctgcattttatgtcgttgggattattaactggatcttcagtaaattcaacaccacggtgattgaatggatcgcgaagattattcaagaaccactattgaatatgagtcaagggtacggcgccgtcctcttaatgacgctgttagttcaagttttctggttcttcgggattcatggttccaatgtcctggcaccaatcttggacggaatctggttgacggctcagcttgctaatgttaacgcttaccaagctggcgaagccttgccatacgtttggacgcggaactgttttgacttgtatgcatggattggtggggccggctcgaccttactattattagtagcgattttagtgtttagtaaacgagacgaccaacgttcagtggctaagttggcgattggccccggattctttaatattaacgaacccgtgatgttcgggatgccaattgtacttgacccaatctactttattccgttcgttttagcaccagttgtgactgtttcgatcgcctacgctgctttatcagctgggtgggtcgcaccgattacgaacaatatcgtttggtcaatgccaccgattatgaacgccttagttgccacaatggactggcggtcagtggtcttacaattatttaatgccgccgttgcctttgcgatttacgtgccattcgttaaggctgccaacaagattaaaccagcagcgattggagaatagattgtcatgaaaagcttaaagcagtgtttactcatcgggatgaaccttggattattagccgttatcttaagtcccctggccggaacgaccggtcaatgggtgacgctcggattaggtttagcggtcagcgcagcacttttcgtcgtttatcggcgagtgggtcagatagaaaggagccaccagaatgcagattaaattaactttgaacgcccctgtggattatttataccaacagttgatcgattccgcgcgggctgatattcagcagcaaacgggtcggccggcgccacggcggagcttacaaggctatgagtatgccaaacagtggtccaacggtctgaccggtaatttgaagattacccacgcgcaacccggtgttcgatatgcgtatgaattagaaacgccccacgatcattacggcgtcgattatcaattcgtaccggacactgatggtcaccaaactgtcttagaatatgccgaaacctttttaggcaaggataagaagacgaatgccaataataagcttggcgtgctattcctaggatggttccgtaaacgccgctttaagaagatgatgaatcagatggctgctagttataatcaataagtaagttgctgaactgaaaaaaaggatttcgttatttcgaaatccttttttgtgtccaggcaagatatggaagctaatcagttgcaacgagcgtaacttcgtgtatactcaagatacacgggagggatgcgtaatgaaagcacgggtggttggtaattcaacgacattgacaattcctaaaaagttcaatgttgcgaatggcacagagtttgaagcagagcagctagatgatggttcgattttattcaaattgaaacatcgcaatccgttcgagggtgattggtttaatgaccaactagagcagtctgacataaccctggacatggaggacgtcgatagtgaatgggactaatcagtatattccacgtaagggtgacatcgttttaatcaattttaatccgagtgctgggcgcgaaatccaaaagtatcgcccagcattagttgttagtaatcaaaagtatgcgcgattaacaaagctagcgctagtttgtcccattacccatactgccaataaccggatgacggctttggggttgttgatcaaaatcaaaacaccgaaagtcgacggctatatcaatccactccaatttcacacgtttgattacgtccgtcgggatatgcgtcaggttggcgctgtcgataagcaaatattagatcagacactacaagttattaacgatgttgttaatgctaatgaagtatagcatgttgcttaaaatagcgcttagtcacagtgttcaccaatagtgtgactaggcgtgatgttcgcgacgccaaccaatcgtggcaaagttcgcgtttatcggttggttaagcgatgcttgggagcggacgaacggccagcaaacgtcattcctgcaaagcaggcatatcaatgctaaaattaaaagcattcaatccaaaagttaaactagtgataagggagtatgagaacgtgacagcaacaccattctggtcgcaaattgcggcccaagccaaggcagacgggcgaccattttttacgatggccccgatggaagccgttagtaatactgtttttcggcaagtcattagccatgccgctgctccagatacgttttttagtgaattcgtctatgctaagagtattacgaacccgaatacgaagtttccggtgcatggtcggttgtacgtggcggcagctgagtcgcaaaaaccggtcgttcaactgtggggtaacgaagcggctgactttgcttcggctacagctgaacttcgtgaccggggctttgaagcagttgatatcaatatgggctgcccggatgggacggtcatcaaaaatcatggtggcagcgatttgattcgcaatccgcagtgggctgaagacgtgattgcggctgcaaagacgtcgggactggccgttagtgcgaagacgcgcttaggttacagtaaagttgctgaatatcatgactggattgcaacgttgttatcgcaacatgtggcagtcttgaccgttcacttgcggaccaaacaggaaatgagtaaggtacccgcacactttgaagttatcgatgacttgattaaaatgcgtgatgcgatcgccccggaaacgttactccagattaatggtgacgtggctgattatcaggccggggtggcgttagccaaagcacatcctggattagatggtatcatgattggtcggggagtgttcgcgaatccgtttgcatttgagtcccatccccaatcgcatgatttgcatgaactattaggtttactgaacatgcagctcgacttgttcgatgactttgccacccgttatgacgtgccacgttttccgtccttaaaacggttctttaaaatctatgcgcgcccagaactaggcgccactgacctgcgtaacacgatgatggatgccaagtcaacggatgatgtacgcaaaattttagcggcttatcaagccaaaatgcaggtgaccaatcacagttagtgtcagcagcagacaggttgattaaggcagtaatacgttaataaacttcaatcttattatatagaaacatctcgatatcggcagtgagtgctaatgttgggatgtttttgtatctaaaggggtatgacaattgtattcaaatcattggaggactgattgttcgcctgtcgccaagctaatctggatgcttgtaacatcatttacaatgattgtaacgttgtcatcttatcaagaaaaccatgttacaagcattcgttactgccaactagctagtctaatgaacccaaaatgaacggccctagtcaaaacattagcgtcgttcattttgggctttttgatattttttggtgtgcaatccggccctagaagtcacagtgttacatcataaatgttagaataaacctaactaatattttataaacgaaaagtgagcgtggtgttatgagaaacttagcgattgtggatttagggtccaattcggcgcggatggcggtcagtcggttgcacgctaacggcactgctcaagaaatcaagcgtgttaaggaagatacgcgtttgtcggaaggaatgggaacggcacacgtactccagcccgccgcaattgagcgaacaatcaaggcgttactcaattttcgccgactttatgaaaaaatgcccaatacggatgttattggcatcaccacagctgcagttcggatggcacaaaatcaggctgaatttctcaatcaagtcaagcaagaagtggggctcgatttacgggtcttatctggtgacgatgaggcctattacgattatcttggggttgccaattcattggtcatccatgattgcctaatcttagacacgggtggcgcaagttgtgaactgatcttggtcaaaaatggccgcaaacagcaactgatcagcattccatttggcgcggtgacattatcggaacaattcggtctcgacgacttagtgccgtctgcgagtctatttcgggcgcagatgttcctacgtaaccgactggcagatatttggtggttatcagaagcagtgcacttcccaatcattctattgggtggtgccaaccgaaccttagcccgcattaatcggcgccggcaacaaaagttaaaagttgaagatattcacgggtatcgtctgaagacagagacggtgttccacacgtttttggacttactgtcacggtcgaaaaaaggtcgccaggaaatttcaggaatggaatatgatcgtgcggacattattgttggtggaatgttaccgctagtgacgttattacagatgttggatagtgatcgggtgatcttttctgaaagtggtgttcgtgagggaattatttcagaacacctcaattcaataggtcggttcggtagatgagtcgaatggagagaataggaatgagaatatgacagctgattttcggcacttttatcaaaaaaattgggcggaacgtactgccatcgtagcgcaacaggcccatttaacgccagctgaacaggcgttatttaaacaatattatttaccacaacatcatgaaattattgagaattatttgacggattacccattaccgatggggttggctgtcaacttagtcgtcgatggcgtggatcacattgttccaatggttactgaggaaccttctgttattgcggcagcaagtaatggcgctaaaattgtcaagcgtgcagggggcttcacgaccgtccttaatcaacgtgaaatgattggtcaaatcgttctggagcagttgtctgatccggctgcaaccgctgccgtgattgaagcccacgctgcagcattattaaaagtagctgatgcggcccatcccagtttaaaaaaacgaggtggtggcgctcggcgcctacgtacgcgtgttctcggacaaggctatttatcaattgacctattcgttgatgtgcaggctgctatgggggccaatatgctcaatagtatgttggaagccgtggcaaagtccatcggtgtgatgacgaagcaggacgctttaatgagtattctatcgaattatgcaacggcgagcttagtcaaggccatttgtgacattccggtcggattattacaggctgggcggtatgccggcaaactagttgcccagaagattgcgtcggccagcacggtcgctcagcttgatccgtaccgggccacgactcataataaaggtatcatgaacggtattgatgctgtcgctattgctagtggcaacgactggcgcgctttggagagtggggcacacgcctatgctgttaaggacggtcaatatcgtggcatgagtacctggaccagtgatggtcggatgctgcacggtgaactggaattgccactaccggttggcattgtgggcggttcaatcaaaattaacgagttagcccagttgaatcaacgaatattaggtattcaaacagcgggtgatttggaaagaattatggttgccatcgggttagcccaaaatctagccgctttacgcgccttggtcacgactggtatccagcagggccatatgcacctacagttgaaatcgctcgcgatggcagcgggagcgactcctgaggaactccccgttatcttacaacgacttgaattagcatctcaacaagacctcgcaaccacgcaacaactcattgcggaattgcggcaaacaaaggaagagactgatgactgaaattaaattgaaccaaactgttacagatttattaagtaccgccaattcgttatatccgggcaatattagtgttcgttttggtgacacaaaagcgggttacgtccgccatgatcaagcacaacaagtgttagatgatggtgacctgaccgttcgggttagcgatattacggctcctaattacacagcgtcacatgaattattacatctattattgttattacaaggctttccacagattacctttaatttaaccacgcgtgatcaacaactggacgaacaattgatggcaatcgctatggaactttatgacatggtgagccacgtcttggtcgtacgcaaacaacgtgaacataacttaatcgatgagcaaattgaaacgctatacatgcaaggtgtggcggccacaatcgaaccggaacctgcgggcaaggcggatgcgatgatgacgttacggttattaacattgactgacctactcgttttctttaatggtgaattaccagctgatgatttgcaaaaggtgacaacggcctatccacaagcttggccggctgcacagaagctatacgccgtaatcagtcagaagccagttgacaccccgtttgcgatgcggcgtgccgtagtaaagctgtttaaggcttttgatgatcagatgacggcttggcatttaccagtcctacacggaacggaatttgtgaccgttcagagtgtgctcagtgaacggcaagagcggctggaagtccggcagttatttgacgtttaccattcagatctattagataaaaataaacatacccgagcgtacattgggttatataagagtgaccgtcagaatgcgtttgtcctaccagcaccggcgcaaaagaagagcgatgcctttttcaaagaggtgtacgataagacggtcaaagaattattccaagaaatgaatctaccctatacgttacggtaagctaagcagggagatgtcagaatgagtgacattacagcagcacaaacaactttacaacaagctcagcatatcgtttttatgacgggggccggcgtttcgacgccctcgggaattcctgattaccggtctaaaaatggactgtataccgaacaccataacgcggagtattatttaagccacgcgtttttggcggagcatccgctggaattttatcaatatttacaatcaaatttatattatccagacgcccaaccgaatgtgattcatcaaaagatggcggcactgactcagcaagggcgggccagtgtgattacacaaaatattgataatttatatggggtggctaaaacggctcagctcgttgaatttcacggtaatctctatcaggtctactgcaccaagtgtggtcagcatgtcgattggcatgagtatttgaagtctccttaccatcagacagaccatggctacttacggcctaacgtggtgttgtacgacgaggggattgcgagtgccaatatcgaacgggcagttcaatatttacagcaggctgacctagtcgttatttgtgggacctcgtttcgggtgtacccgttcgccggcctaattgactatcgtaatccgaaggctcaagtgcttgcaatcaatgcggaaccgctccagttgccatttgcatttacgatggtgcaacaagatgcggtcgacttcttcgagggggtgcaggtctgatgataacaattggcttaacaacttggacggaacaccctagtttactgggtggtactgaaaagctgaccttaactgaatattcgggagtcctaccagtcgtcgaagtggacacgccattctatggtattccgaaagtgacgacggtcgcgaagtggcaaaaggccgtccctgataagtttcagtttattttgaaagcaaatcaggtgatgacgctgcatgacacttatgacgaaggggtttcgatggatgcgctaaagacagcttatcgggaataccgtgcgatgctcaaaccgttaacgcagcaccagcaattaaaagcggtgctcttccaatttccgccgttttttgaacggtcgaaccgcaacttccattacctacaacggatggtcgagtggttacccggtgttccaatcgcagtcgaatttcgtaaccagagttggtacgaggagagtgtcaaagatgcggtctttagttttctgaaggatctggggattacccatgtgattgtcgatgagccgcacgctttaaatgatggcgttagtttcgagccggtcgtaacgaattcgaaattggcactcttacgcttacatggtcgtaaccagcagggctggtcagccaagggcgctaactggcgtagccaacggactttatatcggtatagtgatcaagaactagctgaattcaagcaaacggtggaacagttacaacagcaggcggacgaggtttgcgtcatctttaataataattctggtggtgacgcggccgataacgcgatggcactcaaagagttgctaggcgtttcgtttggtgatttaggaccgcatcaactggacttgttttaaaatgatttatgagtgattgatgtgatactttgcttaattgaacgagttatcagttgaattactatgttggatcaatacagtcactatgaccgtgaaccgttgaaatttggtagtacggttgaatattctttaattgatgaatcatgacaactaaaaatgtagcggtagttcggacattcaataatgtgagctgccgctacatttttttgcacttacaccttagttaatcaatatggccttagccatctgatttgaaagcgaacggttgggatacatcatttggaagtaaagttagtgtaaagtcaagaagtagtttatgtaaattcctgtttagttttggtaataattatctcgttggtcgtggatacgatggcttgggactgccttaaaactaggcagttataagtaccttaattcatgattcttaggtgaattagggtgattgagaaaagtgcgtgattaagatacactgacttcagttcaagcaactaagtagttgcctgccattatgtgagttgcagatagttatggcaggttgaagtgttgttgagaatcgaatgttaggtcataacaatatagattggggcggattgggtatgcaaccggatattatttgcgcaaatggggttttctgcgctgatggaaaagtcttattaacacgggaatcaaaaaacacagcttattattttcctggtggcaaggtcggtgtgggagagacgctaacacagactctgcagcgagaattaaaagaagagttgtcattagttgtgtcgccagatcggtttaagtgggccttcacccaccgtggtacggcctataatcaaccgggaaaaatagtcgagttaaattgttttttagttgcggggagtggcgcgctcaaagtcgactcggaagtttatgattataagtggtgtcggccggacgatagccggatcgcggaagtcgttcgtgaagcgctggcccgatattcgtgggttgttgaataataatagattaccaataaatgaccggttaaaatcaactcgtgattttaatcggttattttgtggtggttggttgggccatttgaagcatggtagttgactagtctgccacgatctttgcgtgtggagaactcttttgttagtgtttcttaataaacacaggaaatatgatacaatataagagattctacacattggcccagcaacatgttattttagaccaagacgtgttgtttggacgcgtgtgatttgttcatggattttaatcaaagacatgcttaacgagttaatcataaaccagtttgaagggaatttacgtcatggcagaaacaaaaccaacttattatattacgacgccgatctactatccttcggggaagttgcacatcggtaattcatacacgacaattgcgtgcgatactttagcacgttacaaacgtgcgatgggttacgatgtttacttcttaaccgggacggatgaacacggcctcaaaattgaagaaaaagcagaaaaattgaacactgatccgaagtcatacgttgatgggatggcaaaacaaatcaaggatttatggcaattgctagaaatctctaatgacaagtttattcggaccaccgatgattatcatgaacgcgcggtccaagaaattttcgatcggttacttaaaaatggtgacatctacttaggtgagtacgaaggctggtactccgttgatgacgaagaatacttcactgaaacgcagctggctgaagttttccgtgatgataacggcaaggttattggtggtaaggcgcccagtggtcatgaagtcgaacttgttaaagaacagtcctacttctttaagatgagtaagtacgcagattggttgttagattattatcaaagtcatcctgactttattgaaccagctaatcggatgaccgaaatgatcaataattttattaaaccaggtctggaagacttggccgtttctcggacgagctttacttggggtgtccctgtcaagagtgatcctaagcacgtcgtttacgtgtggattgatgccctgacaaactatattacggcactgggttacgcaaccggcgactccgaagacttgtttaacaagttctggcctgccgatgttcaaatggttggtaaagaaatcgtgcgcttccatacgatttactggccaattattttgcatgcactcgggttaccattacctaagaaggtctttggtcatggttggttattgatgaaggacggcaaaatgtccaagtctaagggtaacgtgatttatcctgaaacattggttgaacattacggcttggatgcgcttcgttattatttagttaaagccatgccttatggtaacgatggtttattcacaccagaggactttgtggcgcgggttaactatgacttggctaatgacttgggaaacttgctgaaccggaccattgcgatgatcaataaatatgaagatggtcaattaccagcattcaaagccggtgtgactgaatttgacgctgacttagaagccacagctgccacgactattaagaacttcaacgcttgcatggacagcctgcatttatcagatgcgctggctgaagtgtggaagttggtcagtcggacgaataagtatattgatgaaacggcaccttggcaattagctaagagtgacgatgcgaatgatgctgataagttagccagtgtgatggcccatttagcagctagtttgcgggtgattgctagtttgatcagtccggtcatgacgcatgcacctaaggaaatctttacccaattagggttggacccagcaactttagcaattgccgacttacaactggctgatttgccggctggcgcacaagtcgttgctaagggaaccccaatcttcccacgggtcgatatggatgccgaagttgaattcttgaagggtaagatgacgaaatccgacaaacagaaggggcgtaaagccatggaaaacgcgaaacatgaagctgaagtcgaacaaggctggaacccagctgagactaatttgaacctcactaaaccagcgattaccattgatgattttgacaaggtcgaattgaaagttgctgaagtcattacggtgcagaaattgaaaggggctgacaaactcctacaattccgtttagatgcaggagatgctgatcatcgccaaatcctttcaggtattgctaagtggtatccagaaccggaagaactgattggcaagaaggttatcatcgttggtaacttaaagccacggaagcttcgtggtgaaatgagccaaggcatgttactgtcagcagaacacgacggtcaggtgcaattaattacggtaccagataatatggtaaacggatcattgatttcgtaaaaactaaatgttgagtaaaaaatcgggcgcactgactagtgagctcgattttttatttgtaattcaattgttattttagttgtttttgacaaatgggttaatctcccgtacagtagtacgaacaagaaatgaggtgagaacatatgaagtatgaacagattctcgtatgcgtctccgtagatggaaaaggacgtttttccgaaaattaattaaatttaggagacttaattaaatgaaaaacgtccaaaaacaagtgccatcattattactattaatcacattagtgggttttccacaaatcagtgaatcaaattttacgccgatcttgccagcactcagtcaggcaatgcacgttagcgccagccacagccagctaaccatgagcagttattttgtggcttttgcagttggggtgctcttctgggggcaatatgctgactatcgcgggcgccgtgatgccatgttaggtggattagccttttatttgattggtaacttagggttatatctgagcccgggctttacttggttattggtttgccgcttgatccaagctttcggtgctagtgctggttcggttgtgacacagactatcatgcgtgagagctttacgggtgttactggtgcaaaaatctttgcgaaggtgagtgcggccatggcactatcacccgctctcgggccactcatcggaggtggcgtccagactgtgttcggctatcagcatgtcttctcggtcttgatcatgatagcagtcgtaatactgttgtacgcggggtgttgcttgccagagactcgaccagaaacggtcaaagtggcctcttggcggcaacaaagcgttgtcgtttcacggttattgcacgatcccgtggtctggtgttacggcctattgattagtggtattaatggtattttgtttagttattacgctgaagcgccgtttatttttgaaacgcacttcggctttagtgctgtgcaatacggtagtctcggtttagtcttagccgcggccagtctgctgggcgcgttgctagtgaattggcttgtcaactattggtcaccaatgcaggtcgctttaagtggcttaggattgagtttggtagcggcagttggcttggtgatgaccgctgttggcaatcacgtcattgggatgctgattgggatttttctagccttcttaggtctgaacatcaccctaccaaacgcgttgaatcgtgctttgattggctatgaaacggtgatgggaagtgccagtggctggtttagcctgggttattatctactagtgagtgtgctaacttacttaatgagttggctccaccacggtagtatcgtgacattgcccgtatacatgttaggcgtggtcgtcgtgatgacggtggtgtatgcgggactgtattggcggcgtgtacgtcattaattttgcttgaaagcttggggaaacccaggctttttatattggcattgtttttaggtccagtaagacgttttgaaaaatcgtgtcccagtattggatgtgtaaacagtgcacaatatcaagtgcttgactacaggcggtcaatggctggttgggcttagtcacgtagtccgtaatgccctgacagaattttagtagtaatgctggccgagttggtcagagggaaagttgatcgttgtcattataggatatattttagtaattagcttgggctgtttatcgtgaacagcaacgaacagctggttggctagaaatgtcatgaaggttaaagcttcgtcagtcaaccgttgatatttgtggaaacttttattagcgcttgttaataggatgatttgctgctctggcgtaagagtggtgaagatttggcgacataacatcaaatcatatttggaccacagttgaagattcaataggtcttgaataagcccgtcaatcgctgctcgtaacgttgaatccagtgcctgttgtggtgtttctaggtggtgcaaagccaggtgggttagcgttagtaactgttgataacgatgagcatgcgttgcattaaatagcttgtcaatttgcttctttaatttccaaagctcgccaatatcttctttgacgactgcgttttggatttgttgcagcaattgttcaaccgggggaatttgatagtgatgtaagatgaagtcaaattcctgaagggtaagttctaaccgctctagtagctgtaaaaagcaaacagccgagatgttgctgtgaccgttgatgaagcgatagtaagttgactttgagataatgcgttcattgttagtaacatcattgactgatagtcttttagcatgctgaaccatcttgacagttgcaccgattgaagctgaattagacaaactggacactcctaaataactggatttgctgatgatttcccatatctgggaatttttctcgcttagaataattaatgtgctacattaaactgaacgaatagttaatgtggtgaattgaacattgcgtgtatcgttatctgatgattttgaacattctattaactattattgttttatgttagttgatggaattaagcattgaatgaaaaagattagaataatgtatgaatttttgaaaagagtactttgtgttaaagcaggtgaatgttagtaaccataacactgaggtgttgttactgaaaagtgtcgctattgaattgagaaaattaaaaccagtaattttgaatatcgttgagatgggttattggttttaatgaatatactcaaatttggaagatgtcaaaatatgaaatgttagcgcagatattgactttaaactaaattattcttcgaaaaagtcacaatacataataaagattgtttgaagtcctctcagcggttataaagtttaaattgatagtctccattcagcatcgataatagtttttgtaagggtgatttgatgaagcgctggaatcgattattacaacgtattcaagtaaaatatggcagtttatcagagcagcaattgttaaaaatcgattattggttattagcaatctacctagtcttgtgtggcgttgcctacattcgtctgcttcattcccgcagtgctgtgctccaagttgtgccggaattaataattactctaatggcatttggattgttgcgaataattagatggcggaaaaccacgcccaagagtcggtttaagtttgcgactgaggattattcaccagaagagcaattagtttttgtgatgattgtttttttagaaaattttccgacccccgtggtaatggaggtaatcggaaatattttatttattctgattagtattcggaaatttttccaatataaactggaccgattatcagcgtatcgaacgttgaatattatcctggtttttgaaactgttatggttagctggatcgtcctatttggtggataaggcagtgctcgtgaattcaatgattggcatgggctgagattgaagaaaagtactgtgaatttttgtcaatcattctagttagaatatagttagttaagagggtgcctagtgcagcctctttttatggctaatgactagtatgtcgttattagtttgcaagaaataggttggatggcccgtcttcttttccgaaaacttgcgtcccatggtaaaatcaactaagataacaaaagtcgaaaaggggttattacatgcggatttttgattctcatacccatttaaatagtgaagaattcatccaggaagtgccacgttacttacaacaagcggctgaccttgatgttacgcggatggcaatcgttggttcgaatacacaactgaacgccgatgcgattaaactggcggaaacgtatcctcagttagtcgcgattgttggttggcacccggaagatgccaaaaactatgatcaggcggctgaaaagttgttgattgaacaagtccaacacccgaaagtcgtcgcgttaggtgagattggactggactaccattgggatacgtcgccacaagacgttcagcggcaagtctttgcccgccaagtcgccattgctaaagagatgcaattgccaatttccgtgcacaatcgtgatgctttcgaagatacctataagatcttgaaagcagctgatattcgtgacacgggtggcgtcatgcatagctttaatggtgaccctgagtggctcaaacggttcttggacttaggtatgcatatttcctatagtggtgtcgcatcatttaagaatgcgcgtgaagtccatgaatccgtcaagcaaacgccactaacgcaaatgctggttgaaacggatgccccttatctaacgccggaaccataccggggaaagcagaacgaacccggttacacgcggtacgttgttgaagcaattgccaagttacgtgaaacgacgccggaaattatagcggcccaaacttatcaaaatgcagaggaattttttaagattgaaaaagattaaagaagtaattgtggttgaagggaaagatgacacgaagcgtctcgccctagctgtcgatgcagatacacttgaaacgaatggctcggcgatttccgaagccaccttagcccagatcaaaacgttgcaggccagtcgcggcgtgatcgtgttcaccgacccagacttttccggtgaacgtattcggaagacgatttcggcggctgttccgggtgtcaagcacgcctttttgccccgcaaagctggtgtaccaactaaggctggggggagcctgggcgttgaacacgcgagcccagcggcgatccaaactgcactcgcccatctatatacggagcaaatcgacgagccccaacagttgatcagtcaccatgatttgattgcggcgggcttactagcgggtcccacggcgcgtcaacgacgcgaacagttgggtgaacgtttaggtatcggatacgtcaacggtaaacagctgcccaaacggttacaactatttcaaattcagccagctgatttttgggcggctgttgaccaactaaccacagaggagaaatgatgagtagagatttagatattgcgaatcccgcccgcacacgggcaattatgcatacgtacgggttacaagttaagaagagtttaggacagaattttttaactgatcagaacgtgttacacaacattgttgccactgctgacattggaaccaatgatgacgtgattgaaattggccctgggatcggcgccttgactgagtatttggcacgggatgcgcaccacgtcctggcctttgaaatcgatgatcggttactgccaattttggatgagacactagctgattatgacaatgtaacggtcgttaaccaagatattttgaaggccgacttagccgcgatgatcagtgaacatttagataacgagcggccgttgaagctcgtcgccaatttaccgtattatattacaacgcctattctgatgaacattttggcgggggacgttgcttttgaaaatattgttgtgatgatgcaaaaggaagttgccgaccgtttggcagctgaaccgggtacgaaggcgtatggtgcgttaacgattgctgtgcagtaccggatggctgctgagatggcgatggtcgttccccggacggttttcgtgccgtcaccgaatgtcgattctgcaatcgtgaaattgacggcattgccaccgcggacacacgtgccatttgacgaagcagcttttttcaaggtcgttaaagcgggctttgcgcaccgtcggaaaaatctgtggaataatttgcaaagcctatttggtaaacaacctgagacgaagacggccattcaacaggctcttgatatcgcgacgattgatcccaagattcgtgccgaacggttgacggtcgatgaatttattacattgacggatgcgttacatcaggctgacttactttaagttatctatgcttataaaatggttgcacattagaaaaccttgtgatataatattgacttttttgtgaaaagctagtatagtgtctttcatgaggaggattctcaatgccaatttcactagctgcaattaaagataaacttgactcacggatcggccaacgcatgaaggtcgttgcccaggctggccgtaagaaaacaactgaacgccacggtatcttgaaagaaacttatcgttcggtgttcgttgtggatttagatcaacaagaaaacgcatttgaacgggtctcctacagttatactgatgttctgacaaagaacgttcaaatcgcttttgatgatgaaacaactgaagcttaattcgcgtctcgtgaattctcaatattaagacccccaagcaaggtctttttattttgccttgatattagtataattgtatcaaagtaagtcagcgaccccgggtaatcgcggtcatggaagagggtgagacgcgtgcagatcgttgaaaaagcaccggccaaaatcaatttaggactggataccttatttgaacatccaaatggggataaagagtgggacatggtgatgacgtcggtcgatctggccgactatgtcatgttagaatcattgcatacgaaccgaatcgaagtggtcaccgatagtggctttttgccgaatgatcgccgtaacttagcttttcaagcggtgagtgttttaaaacggtattgtcatgttgatcggggtgtccgtatcaaaataagaaaggccattccggtagcggctggtctaggaggcggctcatctgatgccgccgctgttttacggggcttgaaccggatgtggaatctccacttggacttagccacgttagcacgtttgggattgcaagtagattcggatgtgccatactgtgtctacagtcagacggcccacgtgacgggaaaaggcgatgtggttaccccactgcctaagttgccgccgatgtggattattctcgcgaagccgaaagtcagtgtgtcaacgccaaatattttgcggcaggtcaattacgagcgcatcgaccagcatcccaatattgaggccttgttggctggtattcaacagcaggatttcgcggagatttttgcgaatatgggcaacgttttagagccaatcacggcaaaacgctaccccgagattttacagatcaagcggcaattgttaacgtttggggcggatgcggcccagatgagcggcaccggaccaactgtgttcggtgtgtgtcgcaaacaatcgcgggcgcaacgcgtgtataattccttgaagggtttttgtcgggaagtataccttgtgcggccagttaatttaaatgaacattagaccgtagtagtccgccgtgatggtgggctttttttattggtacggggttaggtgagccgagtctctaatttactgctacgcttaaacggtagcgctgagccatttgtcatcacgacctgtgtccagccagagatggtgtagcagtgcaattggcaccggaatgcgagtagccgcggctttgcttgcaggttgacacacgaagatggtcgttgccttcaacgcatcatcggttattcggacaacgcaatctctttttgtaagcaatttatgcgcgtttatgattaaataaggagtaacggaggtgttcggatgaagcagtcgacaaaatttggattgaaattggcgggcgtcattggtgctgcaacttatgcgggaacgttacttggtggcttagcggcgtatcaagtcgcgatgcacgtgagtgacgcacagaagcagcagggccgcgaacgttcgcgggcagaaaacactgaaattgagaatttttggtatttcaagcagcctaaacagcagtggatgatccagtcctttgatgggctgaacttagtggcaacatatatccctaatccgaaaacaattggccgcttggcgattttggcgcatggtctaggacattcgcgcgaacaaatgattccgtatgcgcgcatctttatgagcttggggtatgacgttttaatgcctgatgcccggtcatttggtgatagtcaaggccatacgattggttatggttggctagaccgactagattatgaacgttggattacgatggcgcttagtcaattaggtctggatattgacatcgtattgatgggaatttcgatgggggccgccacggtcatggcgactagtggtgagccgttaccggagaatgttaaagctattgtggaggatagcggttatgcggatctttatgatgaagcgaagttcagactgactcataagttccacttgccagcctatccgattatgccggtggcgaatcgcttagcacacgttcgcgcgggctatgggtttaaggatggccggattctgcaacgggtgattgatggtgggttaccgatcttgatgattcatggttccaaggatcagacggtgcctgtccgcaatgcacataccttgtacgaccagttaccacaacaaaagggcctgtatatcgaccccgatgctggtcacgttgaagccatccgaacgcacccggatcgctatcaagaagtgttggatgaattcttgcatgagcaggcggggttggcttaagcaccttaaattaaagtaatgataaacatgaattgaccgtgttttaccggcttaatggtaaaaacggtcttttttttgcaatctcgtcttagtgataagcgcattcaactagtggtcaaggtgttatttgattaggccccgatgattgccgcagctggtaatgattacggcattttgaactcaggtattgacaaatcaccgcattcaggtaaactaaaatagtaatcattacgatttactttaatttagaaagttggggtagtgttatgacggaaccgttaattgccgtccaacaccttggaattggctttccaaacaaccaggtgtttaaagatttgaattttaacattgaacaaggtgactttttgaccgtgattggtgagaatggggtggggaaaaccactttaattcgcgccttgcttggcatgctgaagccaacagccggtcaaattaagtattatccgaataaaaaagccattaaaattggctacgtgccccaatttcgcaacttagaccaggagtatccgttaacgattgaggactttgtcgggctgaacctaaaagggtggcagccgtggctgtctcgagctgaacatcgtcaggtagcgacagcattagccgtgaccaatttgaagaaactccgtcagcgaccgcttgggatggcttctggtggtgaaaagcagcgggcttacttagcacaagcaattgtgcaacaaccgcagctattaattttagacgaatcgacggctagtttggacaatgaaatgaagtatgaattgttggacctcgttcagaacttaaaccaaactagcaacattaccgtcttctttgtgacgcacgacttgccattagcgaagcaatacgccaaacattatctggccttaaagcccggccaccagcaatttggcaatatcgctgatatgtcggtagagcaattaaaggaggccactaatgtcaatgtttagcttagtatttatgcgaaatgcctacttagcaggaacctttattgcaattatttgtgggacgattggcgttttcgtgattgcccggaacctctcatttctgacacacacactgtctgaaattgggtttgccggtgcagccttcgggatttttatgggctggaccgcgttgagtgggatgctgatttttaccgtgattagttcggtcatcgtggggcagatgagtgtgaaacaatcacgacgcgaagcctcgatttctgcaatttccgctctgtttatcggcttagggattctattcctgtcgttatctaatcaaacttcgagttatgcgacgagcatcctgtttgggagtgtgattgggattgccagtgcggatgtcatccgggtcgcaatcttatcggccatcgtcctactcgtgatgttgggcttgtaccggccactcaaatttgattccttcgatgcgattggcgcccgggtgagcggcttatggacgaccggcatctcagtggtcttcttggtactcgttgcgatgagcgtcagcgtggctgcccaaattgtggggtcattactgatctttatcttactcacgttaccagcagcggcagcgcgatactttgtccatacggttagcaagatgatttttctagcgattggtttcgcgttgattggggtttggctggggctgtacttgagttacgtcacgaatttaccagtcagtttcttcatcgctgcaatcgagtgtatcttctactttgccgcgctgggttatcagcgacttcgggtcggaagctagtggggctattcttgttcagctgtatcacgttaaaagtaggtagtttacagaattaagtggttcgttgtgacacgctaaaatgttactagtcgtttctggaattcattgggaattctagagcggctagttttttgttcgtgttggggttgcaacttttcgtttgcgtgggggggcaagtcacacaagaagttttctaaaagcataagtccaagggtagcgctgtaattgccacacttagtcgtaggacgggaatcagtaaaggtatcatttcgtttttgacggatatgattgggtataatgatatttataccattattacggggaaagatgcgctactggtaagaagcgttctcgtttgaagggtgcgttttggacagccttgaactttgtgccggtcgggcaactaagcaggcaatgaagcgtgcggctgaggaattggccaaacgtaagccggctaggaagacgaccaagaaagcagccacgaagtctcacaaaactacaaagaccaagcatgggacatcaaaagtctaagcctcaaaagacttctcatgcgacaaaacacaagaccaagaagcacaacagaagcgctacaataagaaaaaagttgcgggcaaggcaagaaaagcttctcagagaaaacaatcctcgcagaataaagatagtcatgggaaaaaggagaaatctagcaaggaaaaatcttcaaaagatgggaaagataaaaagacaaataatgtcccattggaaaatggctcttatattaggaacggaaaaccttatggacgaccaacattaaccgggaagaaaaaactcgaattcgagcaggaagtatataataggcaagctaaagatggagtgcttattgatcgaaatacgaaacaagtgatacattggaagccgggctaaccccgaaaaggaaaggtcgatctcggacatctaccgggtaagtcttataaggaaatgttcaatctatataaaaataggaagatgacattgaaggattttcaatttaatcccaaaaactctagattagaaactccgtctgctaatcggagtcataaatatgaaacgaggtaaaaagtgtgctagtttacaatgcttttagtgcggtaagagatggaacatttgatcagtttaaaaattattattctggcaatgtggatgagactgataagtttgaaggacttaatttattatgcatggcaatgacaaacgatgacaatcctgaggaaaagttaaagattgttcattttttgttacaagcaggtattgatgttaactttgtcaccaagagtgaacatcgaaacgcattacattatttttacaattgtgtatggcgtccaaatcctaagtttgctatggaaattacgaaactattagtcgagaacggcatcgatgtaaatagcgttgataagtatggacatgtaccactgttttatgcggtttttgataatgatttggatactaaggaaaatgaagagttatatttttatctattaaaggcgggctcagattatcgtttgcgtgatccatttgggaaatccattatagattatgcacgagaaaccaacgagaggactgattttttagatattgtaaaagagtatgaaaacggcaaaaaatgattgcaggttgaaaaatggcaacgattataattattggagtagtaattataggaattacgctgggattaggatactggagttatttactgggaaaaaggaatcaatctaattttgttggccctattattccagtagcttactttgctgttcgagcaatcttagctgtgatgacacaaactacgacacatgggctagtatcgtcattactcggtagcttgttattcagtttgatttactatggcttatttgttgggggtaagcaccgggccaataagtaacatgaattagtcagattaagataaccgatattcgacaaggactaattgccgagtatcggttattttatagaaaagtttagtcggtaatttggtaattactgttgtctatatcctattgtttggggacgacaacgattcaataagcagaagccaataaaataaattgcttgaaagctcagaacgattccaaaattactcgttctgggctttttaggtgtaagtagcgaccaatcaatcgaactttctggacgctacgtcgtgtgaacgatggattcccctggcacattccgtatctactccgttataagttgcctaagtttattgttctcgaattcgccaaatatgagctgtacagacaagataattggcaaacatattaagaaattccgatggtttagtaaaaaaatgtgaaaaaattagcttatttccgaacgtttgtgttatcattttgcatagactttaaaaatgatgatttaggttgaggtggaagttatgaaagtacgtagaagcgaacgtttaatagatatgacgcgctatttgttggaacgtccccatacattagtttcattgacatacttcgcggaacggtacgcatccgcaaagtcgtcaatcagtgaagatttaacgattttgaagaaagtgtttcaggcccggggaacaggaatcttggaaaccattcccggtgctgctggtggtgcacggtttattccttatattttaaaggaagaggcccaagaatttattgacgagatgaccactaaggttgccgacaagagtcgggtgttaccgggtggctatgtttatttatctgatattttaggccaaccagatattttgcgccaagtgggtcgggtgattgcgactcagtacttgaatcaaaaaatcgacgctgttatgaccgttgcaactaaaggaattccgattgcccaaagtgttgcgacttatttaaacgtgccgtttgtgattgtccgcaatgattctaaaattacggaaggctcgaccgttagtgtgaactatgtctcgggttcttcagaacggatcaagaagatggaactttccaagcgaagcctaacggaaggcgccaacgtgctcatcgtggatgatttcatgaagggcggcggcacaatcaacgggatgaagaccttgattgaagaatttgatgctaatttaattggcatcaccgtttttgccgaagccagttttgttggcaatcgtttaatcgatgactacacgtcgttattacgagtaaccaacgtgagtgatagtgacaaggcgattaaagtcgttgctggtaactatttggagaaggttttcggtgcggaagtctagcctggtgtgttatccagaccagttttttgatatgatggacttatctgaggactaaggagtaatttgtaatgacaaccaaaaatgcaatcatcatggccgctggtaaagggacccggatgaaatccaagctagtcaaagtattacatcaggtctgtggcaaatctatggtcgaccacgtcttgacccaagttgaagccacccacatggcaaatatcgtgaccattgtaggccacggtgccaaagatgtggaagcagccttaggcgaccgaactgagtacgcggttcaaacggaacaattaggaaccggtcacgcagtattacaagccgaatcgctcttaaaagatgcggatgggatgacgctgatcgtcagtggcgacacacccttatttaaagctgaaacttttgaagaactatttgaatatcatcaagctaagggtgctgctggcacgattttaacgtccaaggcacctaatcctcaaggctacggccgggttgttcgcaatcggttaggcatcgttgaaaagattgtagaacaaaaggatgcgactaaggaagaacaagaaattcatgaaattaacacgggagtctactgcttcgataatcagaagttgtttgccgccttacatgaagtgaccaacgataatgcacagggcgaatattatttgactgacgtgattcagatcatgaagaatcagggtgatgtggtcgccgcctatcaaatggatgattttgatgaatcaatgggggtaaatacccgtgcagctctagcccaagcaaccaaagtgatgcaacaacggatcaacgcgcagcatatggaaaatggggtttcaattatcaaccctgacgatacctatattgaagcgggcgttaagattggtgctgatacgattattgaaccaggcgtcttgatcaagggccatacgacaattggtgaagattgcttcatcggcgcgcactccgagatccatgacatggtgattgaagatcgtgttcgggtgacggcttccttcttggaagattccatcatgcacgctgacagcaatattggcccgtatagccatttgcggccgcaagctgagattggtgaacacgtccatcttggtaactttgtcgaagtcaagaaggctaagatcggtaatcggaccaaggtcggccatttgacttatgttggtgacgcaacgttaggtcaagatattaacgttggttgtggtgtggtcttcgttaactatgacggagtcaacaagcaccacacgaatgtcggcgattccgcctttattggtagtaactcgaacatcattgcgccagttgaagtggctgaccactcgtttatcgcggctggttcgaccattactgatgatgttaacttccatgatatggcaattgcccgggcacgtcagacgaacaagcctgacttctggggccgcttaccacatgaaccagaaaacatgtaattattatcattgataattgaattcagagaccatccaagtgcgttgttgctgggatggtctctttttgttagctcatcggcgtgacttgtggtgtaataagggctatttagctgctaaataggacaaagttgatttgactgtgtcagttcagggcaactgagtgattttaattaagtcacgaaattggtataattggcgaggagtttacgggacggggaagtttggaggcatttagatgcagacgaagaagtggattcacggccttgtttgtggtctggcattgcttggcggttggagctgggcattaccagtacacgcaactagcgttaaaagtgagcaaacagccgttaaaaagatcgcgcaacgtgatttgaaatcactaggtgggcgctggtcggtcaaggtgacccgattaggtcgacgaaaactaaccgtgcaaacgggaaatcagcgcatgactcgtcaacgttctgctagtacgatcaaagtttatgttatgctgacgatttatcgacgggtccaacaacgaaagttacggctaacacagcaagatcaaaatgattttaaattaatgattcataattccgataataacgcggctaaccggttaatcaaacgtgcggggggcttcaggagcgttaatgcggccattaagcattatcgattcaagcagacggttttacaacggtatatgcttgatacgaacgcgctacgctggggacgcgataattacacgtcggtggctgatctaactcgttttttaacgctgacatatcaacataagttattaggtaagacgtatgataagaagatgctgaccttacttaagggctgtcgcaaccacagcaagctaccatacttagttaaacacgccacggtctataataaaactggcgaatatcccgataagggtgtccaaaacgatgcggccatttttaagaccaaacaaggcacttatagcattgtcgtcatggcccagaatggcaagcagtaccaacaatatcaagggatgaatcgcttggggcgcgatgtcgtgacttatttaaatcagcaccactgagtgtgtttagataactgaacagtctagtagattcctgttcgtcagccggtgtgcgctctattccgacttctagtactggctacttttgaacgcgagaaacggcagcggtcaagtaccaactaagacaataactagtgcaatgcgtgtgtcagtaccaattacaactgatagcggtctcattaactaagattgttcggtaatcggggctcacgaaactttaatctttaatcacgaaggggcttagattgccgaaagtcgtgcttccagcccagtctcacgcaattttgccttgttgttgggacttgattttcactagcaaaatgcctattatttagtaagtaataaattttcgaatggaggaaattatgtcagaacagtattttgatccaaagttaaaaatctttgctttgaattcaaataaaccattggcagaaaaaatcgcggacgccgttggggttaagttgggtaagacttcggtcgatcgctttagtgatggcgaaattcgcattaacattgaggaaagtattcgtggtgatcaagtttatatcattcaatcaacttccgctcccgttaatgacaatttgatggaactattgatcatgattgacgccctacgtcgcgcgagtgctaagaccattaacgtggttattccttattacggatatgcgcgtcaagatcggaaagcacgttctcgcgaaccaattaccgctaagttagttgcaaacatgctggaaacagccggtgcaacacggattttggcactcgatcttcatgctgcccaaattcaaggcttcttcgatattccgttggatcacttgatgggtgcgccactgttagctgactacttcctgaaccaccacttggatgaaaatgctgtggttgtttcacctgaccatggtggtgtgactcgggcacgtaaattagctgaattcttgaaggcaccaatcgcgattattgataagcgtcgaccacgggccaacgttgccgaagttatgaatattatcggtgatgtcaagggtaagcgggccatcatgatcgatgatatgatcgatacggctgggacgattactttaggtgcacaggcactggttgatgcgggcgcaactgaagtttacgccagttgtacgcatccagttctgtctggtcctgccatcgaacggattgaaaagtcaccaattaagaaattagttgtgacggattcaattgaattaccagctgctaagcgaatcgataagatcgaacaagtttcagttggtcaattaatgggtcaagcaatcaagtttatccatgaaaataaaccagttagtccattatttaagaatcgtttccataacgaagaaaattaattgacgaagcgtcaaattggcaattgctgatttgacgctttttaagttgcagtaatttctaaaagtgatagagtaaaggtgttgtttggtgggcattatgacctagtcaaggttggactggacgccgtatatcaacgaatctttcgttttggcgtgcttcaacattaattaggtgatggcgcggaacggataacggaccaacgtcgggctaccggcgtcctttttttatccaataaacactagcacgaatccttaaaatgattacaatataagttaagggggtgttgcgatgacaccgttttattggggtagtttggcccttgctagtgcgttgaccttgcaattgacggaccggcggcattggttaacgggacatctttttttgattgcagtcattggcattttgttaagcgcttaccatcgattcagtgcgcaggcaagtcctacttggcaattcatgttggtcggtgcaaaaattttggcttatacgttgttgccaattgtaattttgattgtgggcattagttttgtcaggtatagttaccgattgattcgcaaggagggctgggcgtttcattacagcttgctagcaatcgtcggtggtgtattagtcataatgctggtcttatcagtaatcaacttaggagtttggcattcgcgacgcttgtggcagttattaggcctagcgttattattgacggcgtattttgcgttcagctttatcgcgtatctattagcttgcgtcatgacccgactaggacgtcatcgacagatcgattatatgatcgtcttaggagcagggttgatgccaaatgggcagccaacgcgaacactggcatatcggcttcaggcggcagcgaagtactatcgggtgcaacgggcgcgttatcatcaaccaatcacgatcgttgtttctggtggtcagggaccggatgaggttatggcggagagtaccgcaatgcggcagtacttagtggatcaaggggtcccccgtgatgccattcaagaagaaaatcggtcaacgtcgacaattgaaaatctaaaattttcgcacgcattaattgtgcggcaacaaccgttttatcgcgccgtgattgtcacgagtggctatcacgttttacgggctaatatttttgctcggcaactgcacctgaacctaacgggaatcggtgcgcacacgccactgtattatttaccgtttgctatgtttcgggaatacttggccttaattgtgatgtatcgctgggccaacttagtggtggtacttggtttagcggcttattatgtcgcagcgttagttaggttaatttaacaaagccgctactcagagctttgaaaaaaatgacattgcgattaatggtataatggagaatgataaaaaggaggggtttgccgtggatcatgcctatcgatcatcttggccactgattgtaatcgtcctactcggattgattacactttcaggctgtgccaaaaataccggaggcgtaaccgcaagttcggcaacgaccgcaactggtaacagtacaacggccgttttaaccaaagctgatcagcaaatttcgcaacaaaaaattgccgctgcccagaagactttagcgggtgcttctgaattaactccagcgatcaaaaagttagcccttgggttaaagtattatcaggaagctgaagaagcacttgataataatcagctcagtctagcaaagggttattttgacacgttaagtagttatgatggcacgactgacgccagttttattgctgctcggcaaaagctcgtcaagcagtaccaggcggtcaagctagccaatggttactatagcgctgcccgtgatgaattaagtattcatgatttggccactgcgaaggccaatattgataagttggacgatgtgcaagccacacatccggttatcaaaaaattacagaaaaaagctttggcaatgaaacaagccattatgaattatgaggcgtcgcaatcaactagttctggtagtgatagctcaacggttgtcagttcgagttctgcggctagtgcgagtgatagtaggacgtctgccagcagtacgagtagtactagtgccgatagttcaacgatgacaagttcgtcgaatagcagcacgtctgccagcagtagttcttcagagctgacaacttcggcgatcatcaaacagtttcaggatgcgtccggtgttacgtttacttcggataccgaatttaatattactaaggagaccagtgcttattatcagattaccgcaatctatgcgacgaatgagtctagttcttctgcttccaagacagtaacggatacttatcgttattatccggatagtggtagtgttactaaggaaaatagtgcaactggtagtttcgaataaccagcattaaaaagtgacgatcaggtaatgactgatcgtcacttttttgcttgactggattgtttagaaaacgctgggtagcggtcataacagtgataaaaaagcaacgctcacggcacgttaaaaacgagccattagcgttgcttgaattagtttgaaaaatagtagcttaggcgagtgcccaagtgttaatggcgtgtgcgaccccgtcttcaacgttagtcttggtttcataacgggcaatttgcttggcctcatcaatggcgttacccatcgcaacactgttggttgcgtaacgcagcatactcaaatcgttaccttgatcaccaatcgccatgacttcatcagcagttaagttcagatggtcggtcaacgtggctagggcgttacccttgctagcggcgggattcatgaattctaggaaatacgcttctgagcgaacaatggtaaagcgcttggagaatgacgctggtaattgcttgatggctgcatccagtagtgggccgtgatcgatgaacatgcacttgacgattggtaagtctgggcgcatttcttccggtgtccggaaccgaatcggcatattgacgagtgcactttcgccgaccgtataagggctgatatttcgattggcggtgtagatatggtcttcactttcaacgtgacaatggatattgagttttcggctgagcgtttcaatgtcgatgtaatcgtcatgtgacagggtaagtcctgtgatgatcttaccggtgattgtctgaaccattgagccattaaaagtaatgacgtaattatcttcaccagcgattccaagttgctttaaaaagggcgtgacgccacttaatggccgtcccgtacaaatgacgactttgattccttgcgcgttagcggcgttaatcgcttgaacggttgcgggatttagttcgctgtgctcattgagtaaggtgccgtccatatcgatggcgataagcttgactgacataataataattcctccaaaattagtgtggtacgaccagacgatcgtttaaaatatattgctggaattcttggtaaattggtttgaataaatcgttttcggcgtttttgctgagcatttcttttggaaagaaaaaccgctgatcgccagagactttcccggtgatggctcgcactaggtcactgacggtggatagttctagtaaggaaccgtctttttgttgcagttcaatctgggtacgcggcttcttcatcttaggatcgtaggcgtcgtaagggagatcgtaactgtcgttgatgtcagtgtagtagtgcgtatcaaagccggcttgttcaattaatttttgtaacgttggaattagcggttgagtcgttgcatcgactcgtgctgattttaagggacgccggtctaagaaacgggttgctaggtcagcgagaatttgatcacggctatcacgccaatggctaaaataagtgtttaagacgccatcgtctaaccgtaaataatcgtgtaacgtaaagttattattgaaaaacggcaataacatcactggtgtggcttcagcgtcgaccgcgtggctttgataaagatcgttagcccgttccagtaggcgatctaggatgacttccatggaacgtgatactggatggaaatagacttgcatgtacatctggaagcgactgacaatgtaatcttcgaccgcgtgcatgccttccatcgcaaatgtaatgccgccttgatacggcttcataacgcgcaaaatacgggtcaaatcaaaattgccgtaattcgtacccgtgaagtacgaatctcgcagtaggtagtccatccgatcggcatcgatttgactagaaatcatctggacgacttggggattcgggtacgttttttgaatgacggccgcaacttgggccgggaagtcaggcgagacttgctgtaagacctgattgacctcggtttcaggtgatgtcaaaatctgaacagttagggcttcatggtcggtgtgaaagatgtgctcgaatgtgtgtgagtatggcccgtgaccgatatcgtgtaacagggcggcgcatagtgcgaccaatcgctcgtgatcatcccaaccaccgtcaccaggggcctgggtcgggtagttacgttcgaagttatcgcaaatacggcgtgtaatctcataaacaccgaggcaatgtccaaagcgggagtgttctgcaccgtggaaggtcagcgaggtcgtaccgagttgcttaatacggcgcagtcgttgaaattccgaggtgttgatcaaatcgagaatgacttgatgttggatataaatgtaatcatggaccgggtcacgaaagactttctccatgggtaatagttgctggcgataggccaaattaattccttctttcagtgatgcaagcgttgttgtcggcgttgcatttgttgataggcttgatttaagtgtgcttgaaattcaggttcttcggtgactaacggcaaacttgttgtgtcgaccgtcccatgttgagctaggatggctataaaacgagcttgtgtagcggtagtgtcagtcggcgctgccaaagcgtcagcaacggtcgtcatgacttgtggatcaacatctggaaaccgcgcgtcatggtgaccggctaagctgacttggtaaaaacgctgaatgagttgactacgggccatctgatcgccatcaacgctgacatacagcatgatgaccagcgcttcggcagtgcgccgttgcgacattccggcaattttacgaccggcaatactcaaatcataatcaccaggacaataggagcgtgtaatctcaccagtcgtgatatttaattgtggccaaactgcctgaacgtagtcgaccatcaattgatatgccgctgtaattgaatagcgttcacgagttgctggaagaaataaggagacgtttagtacaccagggtcagcaactacggctagcccacctgaattacggagcatgacctgataaccggcagcgtgtagatgtgctaagccagcagttagccgtggcaagcgttggtctaataggccgagaatgacggttggctgtaactgccagaaatgaacgattggttgctgacgagccgccgttaaccacagcagggcgttcgtgtacgcaaaactatccagcatcgctgccggttcgtatttttgactcaaagttgcaattgttgattccgtcaagaaagccaccccgttatccgttgttatcgggcacgagggatgtctcatgatgaaaccgccaccgttgtccgtatcatcactaattatactagaaaaatggtaccgttgcattggcttagacaaatcaacttaatctgtagcataccatcataggataatgaaacgtgcaagttagttggctttttgttcgtcagcaacgtgcggcctatttcgacctccggggctgggggacaattgttggaacacagccgactcaaaaagtttacgcgggttcgaactttttccagcagatctaagctgaccgcttttagtcctatttttagttattttggcatgaatggcttataattaaacaggaagttttacgatgggcgtgatgggagtcgcgcggtcgtgaacgctgaaaaggatatagcgagtgtggtaacacggtgatcgtagacgggcgttcagcgtgtgattttgaaatattaggaggtccaaatatggatgatttaacaactggtgtgccagtggcgattcatttagagacgcaggcgcggcaagatgacgatacggcgaactatgcactggatgtcgatggtcaattggttcagatgggtgacgcgttttatttacggtataaggaagttaacgatgatgcgccagaaccgattccagtgacgattaagctggcagctaatggggacgtcgtgttgacgcggagtgcggagaaccgacttcggttgcacttttccaatggtaaacgggtgcgtgctcattatcaaacgcctatggggatgctacctgttgaaacggtgacgccgatgttacgagtacggctacgtgaacggccattttcaggtgaggtgaacgttgattacgatttatacgcgggtgagcagctacttggtaactacaagttgcgattgcaattcacggcctaatttggtattatgtactataaactgtggaaaggacgtgcaccagtttggaactaaaacaatttgatggacaaaaaaagtccgaattatctttaatcgaggttgctcacgcgatcttatcacaacatggtgatgtgatggcttttgccgacttgaccaacgctgtgcaatcatatttaggtaaaagcgacgaagaaattcgggagcgtttatcacaattttataccgatcttaatatcgatggtagtttcatttcgctcggtgacaatatgtggggcctgcgtgcatggtacccatttgaatccattgacgaagccgttattcatacggacgatgacgaagatgaggatcggccaaagcgcaagaagcgtaagaaggttaacgccttcttggccgatgccggggatgatgacgacgtgatcgattacgatgacgatgatcccgaagatgacgataactacgatgacgatgatgatcaggacgacgatactgatgattcagcaagcagcaagtacgatgaacttgcgggtgttgatgacacagacgacgatgttgctgatgaaacgttgccagacggtatcgagggtcaattatcagagttaaatgatgacgatgatgatgacgactacgatgacgaagacgacgaatcgaaataagcttttcaagatttttccttgacgaaaagggaatctccttgtattatcttatttgggctctctggtagaaatacctgagacaaacgatcgtattagctccctatttctgctgaaatagggagctttctttatttataccaccccacgaaataaatctttaaggagttatcacatgaccaaatatatttttgtaactggtggcgttgtgtcatccattggtaaaggtatcgtcgctgcttcgctagggcgtttattgaagaaccggggcttaaaggtcacgattcaaaagtttgatccctatatcaacgttgatcctggtacgatgagtccttatcaacacggtgaagtcttcgtgaccgatgatgggaccgaaactgacttagaccttggacattatgaacggtttatcgacattaaccttaataaatattcaaatgttaccaccggtaagatttattcagaagttctgcaaaaggaacggcggggcgattatttaggcgccacggtgcaagtgattccgcatatcacgaacgctatcaaggaaaaaatcatgcgtgcgggtacgacgacggattccgatatcgtgattactgaaatcggtgggacggtcggtgatatcgaatccttgccatttattgaagcgctacggcaaatgaagagtgatttaggttccgacaatgttttctatatccataccacattgatcccatatttacgggcagctggtgaaatgaagacgaagccaacgcaacattctgttaaggaattgcggagttatgggattcagccgaacatgttagttgtccggactgaacaaccaattacgcgggaaatgcggaataagattgcgtccttctgtgacgtggaaccagaagcagtcattgaatccttagacgttaagacgatttattcaattccgttgaatgttcagaaacaaaacatggaccaaatcgtccttgaccattttgatgtacaggcacctaaggccgacatgagtgaatggattgacttagaacatcatgttcagaacttatcacggaccatcaagattgcgctagtcggaaaatacgtcgctttacaggatgcttatatctcagtaacggaagcattgaagcatgctggctatacggatgatgccgacattgatttgaagaagatttctgctgaagatgttacgccagaaaatgtcgaagaactactcggcgatgctgacggaatcttagttcctggtggctttggtgatcggggaattgaaggtaagattacggcaatcaagtatgcccgtgaaaacgacgtgccattcttaggtatctgcttgggaatgcaaatggccagtgtcgaatttgcacgtaacgtacttggattgaaggatgctaactctgctgaaatcgatccgaagacgccggacaatattattgatttgatggccgaccaagaagacgttgaagacatgggtggaacgcaacgtttaggcgcttacccttgcaagctgaagccgggaactgtggcggctaaagcttatcacaatgaagaagttgtgatggaacgtcatcgccaccgttatgaattcaataataagtatcgtgaagcaatggctgctaagggcatggtcttctccggaacttcgcctgacaaccggctcgtcgaagtgattgaattaccaaagaagcgcttcttcgtggcctcacaatatcatccagaattcttatcacggcctaaccgtccagaagggttattcaaggcattcatcgatgccgctaaccagactggtaaagtgaaggcataaatttagtacggtagaattaagaataaagcacgccagcgaattgttggtgtgctttttttgttgggcggccacgggcttgattaggtcaccgatattcacagtgacaactggtgttgcgaaaatacatggtaacaataaatggttctcttgataatagaaaaataaaatgataataaaaaactattgacaataaatggcgggaggtctagattataagtgtaaattgaaagcgcaaacataatgggttagtagttaatctggttatttagaaagccaacggttgctgaaagttggttgattggactgatgaatccgccatttagcgtttgacttcatttttaagaggtcgcggtgagacgatatactcgtagagcagtaaattgggtggtaccacgttgataaaaaacgtcccatagtcttttaggtgaagactatgggacgttttaattttaaggaggcttttcgtatgttaaatccaaagtttgttcgtaataacccagaacttgttaagactaagctccagactcggaaggttgatccggctgaggttgatgaatacttacagttagaccaacaaaaccgggatgcaattaccaaggttgaaggattgaagaaacagaaaaaccagttgacggaacaaattgggcaaagtgatccgcaatcggaagcgggccaagccctcattcaacaagtcaaacagctgaatggtgatattaagagtacggaagcggcccaaacggaagtaaacgatcggcttcattacttagcgattcgcttcccgaatttacctgccgatgatgtaccagtcggtcctgacgaagatagcaatgttgagatgcgtaagcacggcgatattccaacgtttgattttaaacctaaggcgcactgggaattgggcgaaagcttaggaatcttggattttgaccgggcagcaaaagtcgcgggcgcgcgctttgtttattataaggatgcgggtgcactcttagaacgggcggtttacagctttatgctagatctgcacacacaaaagcaagggtaccatgaaattattccgccatacttggtgaacgctcagacaatgtatggaactgggcaatttccgaagttcaaagaagacgtctacacggttgaatcttcaggaatgacgttgatcccgacggctgaagtaccgctgaccaattactatgcgaatgaaatcttatctgaagatcaattgccaacgtacttcacggcgatgacgccttgttatcgctccgaagctgggagtgcggggcgtgatacccggggcttgattcgtatgcaccaatttcacaaagtcgagatggtcaagtactgtaaacctgagaattcatacgatgagctcgaaaaattaacggataatgccgaagaagtgttgcgcgaattagggcttgcataccatgttattaagctttcaacgggggatactggtttctcatcagccaagacctatgatgtggaagtatggatgccagaacaaggcatttatcgggaaatcagttcatgctctaactgcttggacttccaagcacggcgggcgatgattcgttaccggaaagctgatgggacggtcgattacgtccatacgttgaatggttctggacttgctgttggccggacggtagctgcgattttggaaaattatcaacaagccgatggcacggttaagattcctaaggtgctccaaccttacatgcatggtatgacagagataaaataaaattattatgagaataaattattattcaaataattcatttgaatgttaaacttaatatcactaggattgagatggatacaggctaggactgttatgataatctcagtcctttttaatttggtgttaaaaatacttaatttttataatcgaaatcacatgaacggtaattgtcgccgtgataatattttatcatgaagaaaaggttttcacggcactaaagtgatgtttatcacaaagtggcgttttacaacgagtcgagacgttaaatctaatgggagggttattcatgcaggttatgttagcacattctctggtgtgaccagaacaacgttataaaaaggagatttaaaaatgacaaatatatttaagggttggagaaaaaatgatactttttggatgctgagtttgttcggaacggcgattggggccggcgtgctattcttaccgattggagttggcacggtaggtattcttggtatcatcatgatacttattttggctttgccaaccacattttttgctcacaggggcctgagtaggtttgtcttgtcggctaaaaatgatggtgatgacattactgatgttgttgaacaacattttggctttaagattggattgctttttaccattatttatttcttctccatttatccaatcttattagtttattctgtttctattacgaatactgtatcgaaatttattaccgaccaaatgcacatgcaaacaccacctcgttggctgttgtcgctagtacttgttgggattctcattggaattgctcgctttggtacctctttgattaccaaagttatgagtggcctggcctttccatttattattgtaatcgttctgttttccttttatcttattccgcattggaacggcgcaatcctctcaacattttccagttctgtatctgggggacatttggttggcactttaggaaacttgtggttacttattcctgttatgatcttttcgtttaaccattctccgatcatctcttcattttccgttgccgaacgtaaagaatatagtggggaaggtaaggacaaagtcgataaaaagatttcgacaattctattgtcggccgaaacgttgatggtcattgtcgcaatgttctttgttattagttgtacattggcgttgactccagaccaaatccttgaagctaaaaatgaaaatgtttcaatccttgattacgttgcgactgctttcaataatccaattattaaatatgtttctcccgtaattgcttttattgcaatcgccaagtcctttttaggacattatctaggaacgagtgaaggcttacgtgggattattcgtaagatggaagaaaaatctaacaagacgctttcaagtcgaactgtttcgacaattgttgatcttgttctgctactaagtgcctggatagttgcctgggtcaatccttccattatgggaatgattgaaaccatcattggaccaatcattgcgtttatcttgttcttgatgccaatgtatgccattcataaaagtcctaagttacagcaatatgccggcaaacacagcaatgtctttgttgtggtaattggattaatcgcagttagtggtatcctgttcaatatcatcaaattgtttatttagtaatctgactaaaatacgagatgaattcacattggttaatattattgaagccaatttttgtcataaatctcgttgctagtgttattgacgagattcgcatgacggtgttggggttcgtgagggtcgcgaatcgaatgaccatactggaggctggattaatcacaacggcggaattaattcagaaatgaaagctttgatgcaacggctttatgttttctgatcagtacaactgtggtgcttgcttgtgccgtaacttcaagattcataaagtttcgaaacgatgtattgacgatgaatgcgcaaagaagcgctagttgcccgtaccaaagcttaagttaacgtgatgattcaaataggaggatgactaaaatgacggtgaattacaagagtgtttttgatattattggcccgattatgattggaccttccagttctcatactgcgggggcgtgtgcgattggtcgagcagcgaatagcatttttcaggagaaaccgacagatattgtcattcattactatgaatcatttgcgcaaacccacaagggccacggaacggactatgcgattatcagtggcattcttggttttgatcctgatgatagccgggttccatatgccattggtttggcccgagatcaggggataaatattacctttatcgaagagcctggtgatagcccaatcaaccacccgaacactgccatcattgacttaaaaaatgatgataagcaagtgacggtcgctggatgttcaatcgggggtggaaccatcgaaattcgtgaaatcaagatggatggttttgatgttaaacccaaagggccacttcctatcttgttagttcaaggtggtgagaatgaccatcagcacgtaaccaaacagttggctgatctgactaaagtaaacgaccagcagcagtacaagacggctcggggcaatttatatgaatatgatttggatcgccgcctcaaacaggatgaaatcaaaaaattagcgcagggacacgcaaatttagtttacttataatcagggaggtcagttatgatgtacatgagcgtagcagaactggtaacagcggccaaggagaccaagaagccgatctacgaattaatgattgaacaagagatggaaacatcgcaaacgagtcgtgaagaaatctggcacacgatgggccggaatctagacgtcatggaagcagctgttaataaaggggctgcgggcgacggggtctattcaacaactggtttaactggtggtgaagctgttctcttgaaaaagtatcgtcaaaaagggcacactttatccggcgatacgatgatgcaagctgttcagaacgcaatctcaaccaatgaagttaatgcttcgatgggagtcgtttgtgcgacaccaacggctggatcgacggggacactacctggtgtgattttcacgctgaagggccgaatgaacctcaaccgtgaccagatgatccaatttctatttaccgctggcgcttttgggatggtcatagctaataatgctgggattgctggtgcgactggcggttgccaagctgaagttggtagcgcttctgcgatgggcgctgcggccgcggttgaagttgctggtgggacgcctgaacaaagtgctgaggctttggcgatggcaatcagtaacttgatgggattagtgtgtgatcccgttgctgggttagttgaactaccgtgtgttaaacggaatgcgattggggtcggtaatgcgttgattgcggctgacatggctttggctggctgcacgaacaagattccagcggatgaagtcattgcagcgatggataaagtcggtaagggcttgccaaaggcacttcgggaaactggactgggtggcttagcggcgacgccaaccggtattcggatgaaggaaaagatttttggacgatcgactaattcacaagttcatgcataaaaatgtcgcagaaagatgatgagctgactaaaggcggtatcatcttttttaattagatgtttatatcgttacatgtattaacattttatcagtgtgataaaataatattaagtcataacgttgtaaaaaaatagtgaggtgagtgccgttatgcaaaaaccattaacagctgagcaagaatacgtgcgcgagtttattccgtttgttgattttttagcagatatcttaggccccagtagtgaagttgtcctgaacgacttgttggatttaaaccactccgttgtggcaattcgtaattcccacatatcacatcgacaagttggcgatcctgcaactgacttagcgttgcgaacgatgaaggccggtaaagctgaaaagcgtgattatctagccaactacaagggtgtttcgcaaggaaagcactcactacgatcgtcaacttattttttgcgattagatggtgaaatcgtcgggatgatttgtattaatacggatgatagtgccctagacgatctgcaggaacaagtattgaaggtaatggcgagttacaaacatttgaactcaccaacgattaatcaactcaaaggaacaccagctaatgagaaggcccatgacacgccggtcgcgccggaacatctaaccacttctatcactgatttagctcgggaagtgacccaggctgtctgtgctaagtatggcgtctctgttgaatatttaaagcaaaatgaaaaattagaaatcgttcgtagcttataccaccaaggttacttcctattgaaggattcagttagtgaagccgccaaagtgctcaaagtctctgatccgagtgtttatcgttatttgcagaccgtcaaagatgaggatctccagcaggattaaacgatgtaattgtaagcgattaacgtcatgaaaccctgtcaaaatttagttcagccatagtggcgaaactgtgaggaagctactctgagttcctggacaggtaagaatcatggtcaccaccgtaaaaatgcggcagccaacacaaccagtttgtgtgcgggctgccgcattttaagtagttaaataaactgagcaatcaaatcccccgttgttcagtggtggctggtcgcaattggtgtggcgattagtgccaggggagcgtgtgtttttatgtgattcaggttggaacgtagcccctttttatgataatttggttagaatgacatctttgaggatgtcagtgggaattttctaggtcttatcaaaagggggattaaagattttattaatttggttatcaactgattatcatcataataaatctcatgcaattttcattagctgacagcgagttgaaaggctgatgtagcgggggtcaattgcgattattatcaattatcaaagattatcaaatcgtatcatggaccgttgattggcgcattatatggtattatggtgaataataaatggaggtgatgccaatgttgacaccgaacgaaattcgacgccggttacgacgcgatttggttacaattgccgaagcttatcagattggctttgagagccgtttatacacggaagccgagtatgaaaacttaaagcagacgttattgcagttgcgtgaacttaatatgaaaccccaacatatggaacagctacttgcgattaacgggtaacggaatgttgctaaattaaataaggaagtgattagtcatgaatgctgatagtccatcaggttcaattcagtccagagagtgctaatgccagtgaaatttatcacgcgcattagcactcttctatttttctagcgggcggtgtgttaataatcatttaggacttgagtaggattaaaataggtcgcttagttgaattattattcggtatcacgtcgttcccaatcatcgtatggagtacatagtatgacagtagtaaaatcggtggccaatcgtggcgttaattacgtgacaatgttaactgttgatgtcagaatgaattgtacagcatcgcacgtcttggtggcaccttaaattacgcagatttagcttaattatcttacaaaatcgttcatgaaagcgtttgaattagtcgagttaatgattttattgcgtaaaaagattacagtttcctgatattggttgtatttttgacggacattctttattatggttaatgattgtatgatacagtgtgacacttatttagcgaggaaagttatgttatgaaaaaaatgataatccatggcggaaaacgactttctggggaattaacgatcggtggcgcaaaaaatagtaccgtcgcactgattcctgctgcgattcttgcagacactccggtccaattcgatacggttccgcacatcttagacgttcacaacttacggctcatcttagagtcgatgaacgtccattccacttttgaaaatgatgttctaacaattgatccaacaaatattgaagaatctgaattaccaagtcatgccattaaaagcttgcgagcttcttactactttatgggggccttactcggtcgttttaaccgtgcaacggtgactttccctggtggtgataatattggtccacgaccaattgatcagcatatcaagggttttaaggcgctcggcgctaacgtcgttgaagagaatgactctgtctttatctcaacgggcacagagggccttcacggagcgcgcatctttttagacgtggtttccgttggggcgacgatcaacattattttggctgccgtcaaagctcatggtacgaccacgattgaaaatgcggctaaagagcctgaaatcattgatttagcgacttttttgaataatatgggcgctaaaattcggggtgctggtaccgacgtaattcgaatcgaaggcgttccggcactgcattcgcgggcaacccatacgattattcctgatcggattgagacgggaacgtatctatccctggctgcttcgattggggacggtattttgctaaagaatgtgatccctgaacatatggagtcattcacggcaaaactagtcgaaatgggtgtcgatttacagattaatgaagatagtatttacgtcccacggtccaatgatttggacccaattcgggttaaaacaatgacttacccaggctttgccactgatttgcaacaaccaatcaccccattattattgcgtgctaacggtagtagcgtggtgattgatacgatttatccgcaacgcacgcaacacgttgaacagttacgtaagatgggggcggacattcgcgttcaagataacttgattgtcgtgggtcattcttcccacttacaaggtgcacatgtcgaggccggtgagattcggtctggggcggcactaatgattgctggtctcgcggctagtggcgttacggaaattagtcgcgctgacaatattctacgtggctatgatcgggtcatcgataaattgcatacacttggtgcggatgtggaaattgcagccgacgaagaagttcccgaaaactaacgatgtacagctaagaaagaacagtggttatggaaaaaattttaacaatgcacgatctcgagcagaaaacgttaaaagaaatttataactatgctcgtgagtataaaatttcttattattcgcaaatgaataaaaaggaactctcattagccgttctccgtgagcaggataaaaagcggggctttgtacaaatggaaggcgtcttggaaattattagccaagagggctatggctttttgcggccaattaattatgggccttcgcaggaagatatttatatttctcagtcgcagattcatcgctttggtcttcgtaacggagactatgtggctggtcaagcccggccaccgcgacctaacgaacggtattacggtttaatgcgggtagggacggttaacggtaaggatgctaatgaggccaagcaacggccccattttccagcgttaacaccactttatccacaaaaacaaattaagttatcgacaacggccgccgttttagcgacccgtttgattgatacttttgtcccgattggcttcggtcaacggggcttaattgtcgcacctcctaaagccggtaagacgacgctgttaaagaatattgcaaatggcatcgtcgccaattatccagacgctaagctgattatgttactgattgatgaacggcccgaagaagtgactgatttagagcggtcaatcaagggagaagtggtgagttctacttttgatcaacaaccacaaaatcacgtgcgtgttgcggaattggtgcttgaacgtgcgcggcgcttagttgaagacaaacaggatgtgattatcttattggattcaattacccggcttacgcgggcatataatttggttatcccgtctagcgggcggacgttgtctggtggggtcgatcccacggcgttttacaagcccaagcgattcttcggttcagcacgcaatatcgaggaaggtggtagcctaacgattttaggcaccgcgttagtcgatacgggtagccggatggacgacatgatttatgaagaattcaaaggaactggcaactcagaattgcagctatcccgcgagttagctgagcggcgggtcttcccggcgctagacttgaagcaatccagtacgcgtaaagaggaattgttggttagtcgtaagaatttggagccagtctggcagattcgtcgatcaatgactggcaacgcgttagagtacaccgaacagcttttacaatttttaaaacacacgaagaccaacactgagtttgttcgtgatttagctagcttaaagttcactggtcaatcaacccggcggtcgcgtcgttaatactggcaggcgggctactttgtaggttgacgggaagctgtgattcgtgataacatgtttatcgttggttaaaactatgataatctctgtttcagcaaatgattcagggcaaaggagcgaaatacaatgcaaaaaggaattcatccagattaccatttagttgtgttccaagactcaactactggttttaagttcatctctggttcaacagcaacttcagcagaaactgttgaatgggaagatggtaatacttacccattgatccgtgttgaaattacgtcagattcacatccattctacactggtaagcaaaagtttaccaaggccgatggtgcggtcgatcgtttcaacaagaaatacggtctcaaataagcagacaattaaacggcgttccggcttcggcgggggcgtcttttttgtatgtgcaaatcatcgacgctcacaaacaaagccgcaccagttcgagtaatgaactggtgcggctttgtctcacttacgatatgattagtagcgcataatcgcgagagcagcggtttctacgggcatccggtctgcggggatgattcggatttgcccgttcatggcaatcacgacatcgaccaggtcgtcaattaaattatcaggagcagcaattggatcagttaattgaacatcggccgctggtaaggagccggcgacattcgcgtctgcggcgacaatcaaggtgtcgatccgcccacttagtgctggcttgatcatgtcaaaaggatcggccaatgctaactggcgggacttagcctgatcataacgttctagtaaaatgtcggctaattgggtatgccacatcgtctgaacgggttctgtggctgtttgcattgcgcccaccgttaagtttttcggtgacttattgatcatgaggtgttgtgacaggtacggattcttgttgacggcacggaagactgcctggttatgtggtagtcccattaagatcaatggccgtcgcgtcttttgtgaatgggcctgaacgtactgcgccacttgttggtaataatttcgttggtcaatatcgcgttcttcggccttcgcattatgaccatgatagttggcaccgtgaacggggctggcgttgaaattcagatcaccgccacgtttttcagtgcccaatgcttctgtcagggtgcggggggcctcagctggcaaatcaagttcgacgaaactgccatcacgttgggcgtagagcgccatgctatcttcattgagtgctagcaagtcgaagtcgaattgatgctggcggtcggctagtactgggcgaatagctggcatgctattgacgctgacatggttgtcagtgggatattgtaagtcgaaaatgtgtaggtcacgactgttagtgatgatgcccgtctgagggccagtgtgctgtaaccagaaggcgttgtcattaattaattgctctagttgcgtcgcgtatggcgcaaattcggttttcggaaagtggtgggccatctgggtttcagcttcattaactaattgtttgaattgtaagcggcggcgattgaggtcgttgagcacaacggccgtgttgaggtaaattgcaatgtatgggccatcctcacgttgttgcattagttgattgagatcgttttttaccatcgtttccataggtccaacctgctttctgtttttgatacaattagcataacaagaatccgattacggacgcaaatataatgattatgataagctatagataattctaacgaactaaacgaattcggggctttattatgcgaactaattaaggtatatttaccatagaacctttgataaggggcgtaaacaaattaggaggcgggattaatgaagtccaagcaacatcccgggttaaagtggttaggtcggggcgtttttgtcctgctggtgctagtatcattggcattaattttcaatgaacagatcaagagctggttagtgagttcatactcgccgaccgttacggctaagacggttaagcagaatacgaagaagaagagcgattttaacttctcaaaggtcaagtcacttgactttcagaccgttgccaaggcccgcatgaataagaatgcaatcaacgtgattggctcgattgcgattccgtccgttgatttgtacctgccaatcggtaatggtgtcagcaatgaaacgttagcattggcggctggcacgatgaaagctaatcagaagatggggcagggtaactacgcgttggctggtcaccatatgatcaagcatggcgcactattcagtccgttgtactataagagcaaggttggccaaatgatttatgtgagtgatgccaaaaagatttatgcgtataagacgagtcagcgaacattcattaaagcaactgatgtccaagtaattgatgatgttcctggtcagaagctgattaccctaattacctgtgataagaccggggcgggtcgcttaatgattcgcggtaagtacgaacagcaatggtcgtttaagtcggcgccaactcaggttcagaaggcctttacaagtcattttaataacaaatattaacaattattacattctaggggtatcgatatcttctaacggaatttcacggtacaatataacttaaggtcacatgtctcagataagacataatttagagggggtctattgatgatagctttaattatcgttgcggtcgtattggttttgatcgcaatttacgtggtaatttataacggtttagttaagtcacggatgtatacgcaggaagcatggagccaaatcgatgttcagctaaaacggcggactgatttgattcctaatctggtcaatacggtcaaaggttacgcgaaacatgaaaagagtaccttagcggaagtgatttcattacggaatcaattaacgcaagtgccgagcggtgatcaccaacaggctatggcagtttctgatcaattgacaaattcgttgaagagcatttttgcgttagctgaaagctaccctgatttgaaggctaatcaagaattcggtaagctgatggaagagttgaccaatacagaaaacaagattgcttattcacggcaactgttcaactctagcgctgccagctataacatgaagttacaacaattcccgtcaaatattattgctggcattcatcacttcaagaacgttgaattcttaactgttcctgaagcagaaaaagcagcacccacggtttcatttgaagattagaggttatgcccatgttatttgagcaaattgcccgcaacaagcggcacacgttatacgtgatggccgcttttgtcatattacttgcagtgattggtttagcagttggctacgtgttttttaatagtgcgattgcagggttactagtagccttgattgcagcggtattttatatggtattaatgattagtcagtcgactgacattgtcatgagcatgaatcatggacgtgagctgcatcaagctgacgatgatccagagctctggcacattgtggaagacatggcgttggttgctaaagtaccgatgccacgtgtctttattattgatgatgagagccccaatgcgtttgcgacaggaaatgaccctgagcatgcggcagttgcagtgacaattggtattcaggcacgattaacgcgtgaagagatggaaggcgtcattggtcacgagatgagtcatgtgcgtaactatgatattcggttacagaccattgccttggctctgacagcggccgtcagtttgttagtcaattggggtatgaacgccttttggtggggcggtggccggcgcagtcgggataatgatcgtgacggcaacggtgcccaggtcttactaatgatcctagcgattgttgtcattattttagcgccgctagcagctagtttagtgcagatggcgctatcccgtaatcgcgaatacttagcggatgccggcagtgtggaactgactcgtaatccgttgggcttaatcagtgcacttgaaaaaatcgatgacagccaacccatgcaagcggcggatcctagtagcgcggccctttatatttctgatccgtttaaggcgaagaaatcatggatgcacttattcgatacccacccaccgatggctgatcgcatcactcgtttaaaaaacatgtaataaaaaaatgcgtttaggttaataacggattataatgaaaacaaatagaaagttgaaagagtgagacggttgcaacgcaaatatatttacgccaatttggaaaaactggataaccttgtctttgcttacgggatcgaccagagcgactttgtgcatggtatcaagcgcttgccagctaacttggtctcgttagtcggtgttgatgataacgagcatgcggtaaatgctcacacgggtctgaacgtcattaatgatgaaaatgaaattcggcgatatttgttacagagtcacgcgttacccgttaagtggcttgattatgatgaagttggcgatttggattttctaaccgcgactgagattgccgagctattgtatctcggacatatggatcgtccaattcgatcaccgtttaattacaaactgcgcaaccactacgttttcttggaacaacgcaatggtggtatcaaagtgtacttctattatatttccgcatttagccatattttaagtgctgccattgtgcggcacactttggcagcttaccgtggccggcgtatgtttatgcgttcactgagtgttccacgagtacctgaagcgattctcaagcaactcgttcaattgatgccagatggtttgttcatttactttgatcagtcaatggttcggcaacgccaattattggtgccggtgcacacggagacgacaggcaatgaaatcgaagtttttgatcccgctcgtggtggagagaatcggcgaacccaccatgtcgcgacccttacttttaacttgaattcaggcgtgtgggacttgcaagtgcaggaccaggctgcgttcgaagaacatttatagtattatcatcttaacgcttggctgatcattcagcgggcgtttttaagtcgtttggggcgggatttaggggctaaattggtctagccatagagtccctggggtcaaagtggtataatttttatgcgcgtagcttgaattgggctacgattcgagaaagtggaaccttagtcagaacttggctgaccgacaagtggtcgccatgaatggagagtttaatcgatatgaagatgcaagttgccgaaattgctaaggccgttcaagcggtcaatgccgaacaggcgtggcccgatgttaatgtaacgggtgtggcgtttgatagccgaaagctccaagcaggggatctatttattccgctgatgggcgctaatgatggtcatcaatatattcaaagtgcaatcgagcacggggccgttgctaccttatgggccagcgaccatgccgacgacgttccagaagacttacctgtcattatggttgctgatacattgacggcactacaccagctggggcaatactatttacaaaaaattaatccgaaagtcgtggctgttacgggtagtaatggtaaaacaacgacgaaggatatgattgcgagtgttttgagcactcagtttaacgtgacaaagacgcacgccaactttaacaatcagattggtgtgccagtgacgttactcagtatggaaccgaatacagaagtggtcgtcgttgaaatggggatggaccattttggcgagttggatttcttgagccgtctcgttcaaccagacgttgcggtgattaccatgattggggaagcccacattgagttctttggtacacgggatcgaattgctgatgccaaaatggaaattgttcacggcttaaaagaagatggcacgttcatttttaatggtgatgaaccactgctacaagaacgtgctaaggaagtcagtcagcatcaacggacgtttgggttggatgatacgaacaccttagcaggcagtgatatcacgactagtcgggctcaaacgcaatttaagacgagtctgtggccggacaacacgtacacaattccgatgatgggtgcgtacaatgtcaataatgcattggcggcgctcttagtagctgatacttttcacattcgaccagccgctgcgcaacaagcaatcgccagttttgtgccgacggagaaccggacggaatggttaactggttaccgtggagaagccatcttaagtgatgtttataactctaatccaacggcagctcgacgggtcctagccgcttttgcggcggtacctactaagggtcagcgaatcgctgtactcggtgatatgcttgagttgggtgaccagtcggatgcactacacatgagtttagccagtgaattggatccagccacgattgccagcgtctatttgaatggtgaacatatgcgagcgttggcagaagtgctacaagaaaagtacccagccggtgcggtccactattatcaaacggatcaacagccccaattgattgccgacttaacggcgacggttagtgcggatgatcaggtcttattgaaggggagtcacgggattcaccttgaaaaggttctgacggcgctggaagctgctcctgaaaaataaaatttaagtgattcgattaagcaggcccctcgcaatgactgggtaatggtgacgctaacattagactgataatgttgtttcccttccggtattgctaggggctttgcttgcttatttagaataaccggtgtatgataattcagttgtaccatatgaaagtcagaccgttggcttacatgacagcgtcttacgggaaacggattttttcctagctggcagtaatcccatggtgtcatccttaggaggaaacatatttgaagtttacagaactaggcttatccgatagcctacttaaagcagttaatcgggccggatacgaagaagcgaccccgattcaagccgaaaccattccaatggttctagaaggcaaagatgtgattggtcaagcacaaaccggtactgggaagaccgccgcgtttgcattaccaatcttacaacgcttggattttgacaaccataacattcaagcattagttgtttcaccaacgcgtgaattagcaatccaaactcaggaagaaatcttccgcttaggtaaagacgaacgggcgaaagtccaagtcgtttacggtggtgctgatattcggcgccaaatcagaaatctgaagcaaaacccacaagtaatcgtcggaactcccggccggttgcttgaccacattcgccggggcacggtcaagttagaccacgtcaagatgttagttcttgatgaagctgacgaaatgttaaacatgggtttcttggaagatatcgaatcaattatcaaacaagtgccggatgaacgccaaactatgttgttctccgcaacgatgccacctgaaatcaaacgcattggtgtgcagttcatgaaggaaccgcatcacgttaagatcaaatcaaaagaaatgactgctgatacggtcgatcaatattacgttaaagccaaagaatttgaaaagttcgatattatgacccggttgtttgatgttcaggcacctgaactcacaatcgtgtttggtcgaacgaaacgtcgagttgacgaattatcaaagggtctcgaagcacgtggttataatgccgctgggattcatggtgatttgagccaacaacgtcggacgcaaatcatgcgtcaattcaaggctggtaaattggatattttggttgcaaccgatgtggctgctcggggacttgatgtttctggtgtgacccacgtttacaattacgatattccacaggatccggacagttatgttcaccggattggccgtactggccgtgccggacacaagggtgtttcattaacttttgtaacaccaaacgaaatggaatatttgcgggtcatcgaaaagttgaccaagaagcggatgttaccattgaagccaccaactgaatctgaagcttttgctggccaattagctgctgcagaagcgaatgttgattcgttagttgctaagacttcgactgaaaagtatgctgatcaagctgctgaattattacaaaaatacgatgctactgatctagttgctgccttgttaaatgacttaaccaaggatgactcgtcagcggtacctgttaagattacgccagaacgcccattacctcgtcacaaaggtggcggcggtaacaaccggcgtggcggatatcgtggcggtaatcgcaaccgcaataacagtcatggcaatggtcgtggcggttattctcacaatggtcgcaatcgcgaccgtgatcgtaacggtggccgtggcgatcggaagagcaatggttataaaggtcgcagtcgcgatgataaccggagcagcaaccgcaaccatgatgaaggtcgcaagcaaagcagcaagcggagctatacgatccgcaccaatgattaaagtcaacgcacaaattaagttgaattaaattaactttgcacaaaagccgagcgcacgctcggctttttttatgccctacaatgttagaatacaagtagtcggcagatgttcgtatgaattattgttaaaacgttccaaacgcgtcaagtcaaagtcggccagcttaggccgctggaaaaaagtcgagtgagcgtaaacatgtttggttagcgcgtcctaaaaccgacctccaggcatttctgccaattgctggaacgcggtggacacagatttaagccgcagaccacgtcttaaatactggtcttccactaaccaagcaaaggacgcttgctaagtggaatttcaccgctgagcattggccgaaacgccttccagtcgggacagtgttcgaatggcggacatgtgtgtacccaacttttggtgaattcgtcattgtttttcataaaccataattttgtcaatcaactgtcagactgaaagtgatattgagataattcactaattctgaatcaaaatagtaagatttaatctctcgacaaagtgctagtgcacttaacgctttgtttaaagttccagtatcaaaataggcaacgatagattgtgctaagttcggtgccactaaagcctgtgttggctaggcaatgctcggcttcaacctgtggcctctcacaggcttgagactggaggggatgggtgacaatgctcagtagccaagttattcttaggcggaagtgggttgcttccggcttagaataagactcgtatttgagatgacgcgggttgggcgttagctcaaatcgacgtcggctgcgttccagcaattgtcacccagccctggaggtcggcataggacgcacaagtgctgacgaacaacaaaccaattaaattggaacgttttaacaataattcatgctgacatgaaaagattgcgtgtatgggcccttttatcgcggcggtagctgtggtaaattggaaacatcagcctaagttgacgtgataataatgagatagagggggtcacagcgtgatttatggtaccggcattgatttaactgagcttagtcggattgaagcgattctagcgaagggactgagattgcctgaaaagatcttaacaccggctgagttggcggtgttttcacgttacccggttaaacgccagatcgagtttatggcagggcgtttttcagctaaggaagcatatagtaaggcatatggcacgggaattggtgcggcagttggatttcaagatatcgaaattttagacaacgcccagggtaaaccggaagttacgcgccacccgtttgatggtccagcgtggatttcaatttcacacacggatacgttagtaatgacacaagttatattggaaagaggcaatttgtgatggttgtaattggggagcaccgccacacacaagtcacagtcgacttgcaggcaattaagacaaatattagtaatgaaatggcgcaaaaggatgagttgaccgagttatgggcagtcgttaaagcgaatggttatggacatggaattatccaagttgctcaggctgccaaagaagccggggcgaccggcttttgtgttgcaatcctggatgaggccttagcgttgcgggccgctggctttgcggaacccatcctagtacttggaattacggaaccggaatacgccccactggtagctgaaaaggatatttcactagctgttggaacgcaagattggctgactacggccgcagcaattttagcggctaatcaagtgacgacaccacttcacgttcatcttgcattagatacgggtatgggacgaatcgggtttcagacgcccgaagaattggcaacggcggttacgactttgcgtcaaccgcagtcaccatttgactttgaagggatttttacgcattttgcaacggctgaccaggcagatgatacgtattttacccatcaattaaataattggaaacacttgattgcagtggtggatgagctaccacgctatgtccacgtgtccaattcggccaccagtctctggcatcaagcttgcaatggcaacatggtgcgctttggggttgcactctatggtctaaatccttctggtcgcgaactcagcgcaccataccccttgcaacctgcgttgtcgctaacggcacgcttgacgtttgttaaacgcttggctcggggcaaatcggtcagctatggtgccacgtatacggccgcacaggatgaatggattggcacggtgccgattgggtatgcggacggctatgaacgccgattacaaggcttccatgtacttgttgatggtgagttttgcgaaatcgtcgggcgggtctgcatggaccagctgatggttcgtctgccacatgaagtaccggttggagctaaggtaactttggttggcacggacggtgctcgtaccatttcgttgcaagatattgctgactattgtgggacaattcattatgagattgcttgtgggttagcaccacgagtgccgagagtttatatagattaagttttatcagacgataggtttgcgaagattgtctcgtacaggctatggtgttacatggttggttattgagattaagccaataaaatgagtgccagagaaattctggcgctcattttttagagtctcctattttattgatgagggctgttaagtttttttcagtgattcgagtgatttatcggcatctaattataagttcgtttatttttaaacattgatgaaatcatcattgggcagtcttaattaatcggtctgaagtattagttttaacggtgcttagcgattagttctttggattaaattggtaaacggttgctaaaagtgaatggttcatgctattatgagtagcaagatggttatattggggtactatcagatacattgggtatcgaataaagggagatgaggcgatggccgcagctgacattaagcgtggtgacatcttttatgcagatttatcaccagtcgtaggctccgaacaaggaggcatgcgtccagtactaatcgtgcaaaataatgtcggtaaccattacagtcccacagtgattgtcgcggcaatcactgctaaggttcaaaaagcgaagatgccaacacatgttaacatcaacgctgcccatacggggattgaaaaaaattcggttgtgttgttggagcagatacgaacgattgataagcaacggcttaaagatcgcgtcactcatttggatgatcagacgatgcgccgagttgataatgcgttacagattagtattgggttagctgatcgaacacgacgtcggccacaacgcacgtttcaatcatagtcaatcgatggggattaattatttacataattgaactatttcggtgcgatgaccgagtatggataatcagcgggtttcaattcagttaatgactggattgaaacccgcttttagtttctaaattggctatcggtaaatgttacagggcctgttggagcatttagtgatgagctaacattattgtgcattatgattgtctttctgatgacgattaggtaagctagttgaacccattataacgagggacgattggctgtaactcgtgaatatcggtgaaaggatgggggcataatgagtaaacaggctcagttcaataagcatcgggtggcaggattgttagtcgcgatgggcgtcgtatatggtgatattggaaccagtccgttatacgtgatgaaggccatcattaccggtcaaggtgggatgcaggccgttgatgagaagtttatgttgggggccgtctcgctagttttttggacaatgacgttgctcacgaccgttaagtacgttctgattgcgttaaacgcggataatcatggcgaaggcggtatcttttcactattcgcattggtgcgtcatcgtgcgcgctggttagtcattccggccatgattggtggggctgcgttactggcggatggggcgctaacccccgcagtgacagttacgactgccattgaaggcttacgcgatgtaccagcatatgttcaactgtttggtgccggccaaaatacgattatactgattacacttggaattatcaccctattatttatgctacaacgttttggaacgaacacgattggtaagttattcggtcccatcatgttgggctggttcacgtttttgggagtcagtggcttcgttaatctggtgcaggattggacgatcctgcgtgcactgaatccctattatgcgtggttactcttgatcagcccggcgaacaaagtgggaatcatgattctagggagcgtctttctggcaacgaccggtgctgaggccctatacagtgaccttgggcacgtcggcaaaacgaatattcggttgagctggccgtatgtcaaagcttgcctactactcagctatttcggtcaggccgcatggattttaggtcccggccaagcgattcagggccatgtgaatcccttttttgcaatgttacctgctagcctgacgatggcggcagttatttttgcgacgctcgcggccattatcgcgtcacagtcgctgatcagtgggtcgtttacgttagttagtgaagcgattcgactgaaactattcccccgattactgactacttaccccggtaaagcagtgggccaaatgtatttaccggtcgttaactgggggctgtggggcgtgacgagtatgctggtgattttctttcaaactagtgaaagaatggaagctgcatacgggttagccatcacactgacaatgctgatgacgaccactttgatctacgcgtttttacggcaaaagcgcttaccattaatcggtgcgggactactgaccggtttcttcgcgaccatcgaagtaattttcctgattgccagcgcagccaagttctggcacggcggctacgtagcggtcggacttgctttactaattttcctagtgatggctgtgtggtatcgtggcgaacaaattgtcagacaacataaccacccgcttagtttacgacaatatcaggaccagcttgctaagttacgtaacgatcagacggtggacaagttccagacgaacgtggtcttcctaacaagccgaatggatggcgaccaagtggagcgaaaggtattatattcgattttagacaagtggccgaaacgtgccgacgtctactggtttgttaatgtgacaatcacggatgaaccgtataccgcggagtatactgtcgacacgttagcaacggactatttggtaactgttaagttatacctgggctttcgtgtccgccaagatattaaccgctatttacggacgattgtccgcgacttaatggctacgggacgtttagcggcgcaaaagcagacatattcagtcacttctggccgcgatgtcggtgacttccgcttcgttatcatcgaggagaagttagaaaatggtagtcggttatcccgcttggatcgattagtgatcgagacgaaattaatgattaaaaaatacgcgacaacgcctgccaaatggttcggcctagaattctccgaggtgactcttgaaaccgttccaattctattcaatgagatcccggcgttaccgatcactgaaagacagtaatgccatgcagatttctgggggtcagaatcagccagcttagatttgcttgaaaaagttcagcgtagtgtaaacacgctctacgacatctaattgtaaggcgcttcacgtcggctacgttccagcaattggcaactagccccgaaatccggaataggacgaacaagtgctgaaaaatagaaaactaactgtcggcttgcttaacaactcatctaattttaatttttgcttgagcaactgataactcaaaactaatttcaatagctgatactggacgcaaaacgttgacttgacagcgataaaagaacgactgaattcaaatcaaaaattagaaacattaaattttgtgttgacaagtgtgaacttagaactataatctaattatattctaattattcaaatgcggtgatgagataagtaaatcaatcgtgggtttttcagagagccgggtcaggtgcaagccggtattcccgcatggttgaaaatggtcttggagcattcagtgccgaatgattaagcgctgacggtggtccccgataaacggacaaaggtatctcaattcagtgagattgacgtacctgctgaggactattttgcgaaaaatagtcgaattaaaggtggtaacacgagtcatcgtccttctgtcataacgacagtggggcgattttttattatatatttttggggaggcttcgcgtatgcgaaaaaaggaaattatttttgggttattaagttttattgcactgggaacagtattagctggctgcggcagtagcagtgctagtagtaaggatacatctaaaacctataagtatggtgaagtaacgataccagctaaggacggttctatttgtaatgcgccaaattatatcgcgtatgagaaggggttctttaagaaaaatggtatcaaggccaaactagtagcgaacccgcgggatatcagtgacctagaagcgggttttgcgagtggcaaatatgacgcgcaaaatggtgattttcaatacttacctgcgattcaaaacggggcgcaaatcaaagctgttggtggaatccaccaaggctgtatcaagttgctggttccgaaaaactcaagcattaagagtgttaaggacttaaaaggcaagacgattgggattccggctcagggttcaacaccacaatacgtgacgtccattgcacttcaacatgcgggtattgatccgaagacgggagtaacgtggaaggtttacagcactgatctattggcaaaggcggctgaaaaggggcaggtcgatgcaattgggacggtcgatccgtatgcttaccaagcacaaaaggaatctgggtttaagaccattattgataataataacaatagtggcaatgctaagatggctgcaatgggaatgaaatcaaagggtgcttgctgttacttgtacgtttcgagcaagttagtcaaagagaatccagcgaaggctaaggccattgtccgttcatacaaacaagccgctgcttggatcaataaccatcctgaagagacagcaaagattgaattaaataaggggtatgtctccaagacgaagtttatcaatgtgaagaatgtgacccagatcttgaaagatgaacattttgaactaaatcttaagacaggtaaagaagatttaagttattatatcaagcaattgaagcaagcaggatatttgaagaagaatacgaataacaagcaattgttgaagcaagcttattggtatccagatttatctaagaactaagttcaaggaggtagaatagtatgcaaataacagcagtccaattgagtcgaaaaaaagctgtgcaggcagctaagacaactggccgttattggaagccctggcacttgacctggaacattgttagtttagtcgtattagcaattgcgtattttgaaaaccaattggttgtatcacaggaaaccgttaataatcagacgtatcattggtttttaggtgggtactttgcttatttattgattgttacgctgattggcgcagttacaaatggtcgaattcgccggtataatggacattttgcccagttgaacgtttcgttagttggcttgctgatcgtgcaggatcttctgaccgaaaagtttgccgttctagaacagcctttcttcgtgagctttgcacaaatcttggaccagatgcgcgaaaatgccggcttgctctgggcttcgacgttgtcatcattagcgctttggttgattagttttgtgattgggaccattcttggaatcttacttggtttgggcatgggacgctatcgtgagtttaactactgggcattcccctacttgaaggtcatcgggattatccctgcggctgcatggatgccgctgacgatggtcatctttccgactagttacatggccgaagtcttcttgattgccttctcggtttggtttccagtggccttcatgacgattggtggcgttcaagggattagcaaggaatacttcgaatcagcaaagaccttaggatttagtgagtggcagattatccgcaaaatcgtccttcccggagcgttgccaagtatctttactggcgtttatacggcaatgggattgtcgtttacaatgctggtaatttccgagatgattggtgctaaggtcggactgggctggtttatcaactgggcaaagggtaccgggaattatacacaagtctatgcggcaattgtgattatggcgattctgttttcagtgttatttgcggtgtttaccaaagttcaagattactgcctacgttggcgcgatggtgctcactagaaaggagcttataagatgggattacttgcagttcaacatgttaatcagcggcttcaagacaatgatggtcatcagatcgacgtgctagatgatattgatttcaccgtcaatccgggtgagttcgtagcaatcattgggccgtctggttgtggtaagaccacgttactacgcctgatttctggattagaccatcccgctagcggtcagctaacgatcgataatcagcagattaagcgaccagataattctcgcggttatgttttccaacatggcagcctttttccatggtcaacaatcaaggagaatattagtgtcggcctgaaagtgacgcgtggtcggcattatgaccaccaattggtcgaccattatattgaattgatggggctaaaaggctttgaaaatgcttatccgcatcaggtttctggtgggatggcccaacgagctgccctcgcgcggtcaattatcatgaacccgcagctcctacttttggatgagccgatgggggctcttgatgcgtttacacgtgcggatattcagaatgtcatcgaacaggtttggcagcagacacagacgacgatgattttagttactcatgatatcgatgaggcagtctacttgagtgaccgaattattgtgatgacgcctcgtcctgggagaatcaaagaaattgtgacaaatccattaccacatccacggtcacggttgagtgtcgattttgctgaatttcggcatcggattcaagataaattaaactttggcgctcatgatggacaggttgctgggtgatgactaaaaaatgcttatcaagatgattggcgagataccagtcttgataagcatttttgctgtgaaaaaacaggatcgcatggtggtgagcttgatatggccatccaggggacttcgttagttggactaagtacgaagaagcaggcttattcgcttaccatcgttgtcgtactggccaatagggtcttaagcgtatcaatcgccgtaatcaatggttgtccatgattcaatgcagcgatagccacgggattgtcagtttggtcattaagtgtgaaacccactgctttagtctttgcaggccaatcagtcgtgttagcgattgttgtgacggtgaggtggttagccgcgaacagttcctggaccgcgggttgcgccacagtggcaatatcggtgatgagaccatccactgtgtgccaagtctctaagtgataactatcagccatggcggcatgccaagcggtcgtgaaagtcgggccgataccaagagtctcaccagttgatttcatctcaggacttaaaacgactggtgattgtggcaatttattgaaagagaagactggggcctttatagcaatttgttgtggatcgggtgtcaagagtccggggactaggccaagggttgctaaactttgaccgagaattagccgggttgccaattgtgccagtggcaagtgagtaaccttgctcatgtaaggaactgttcgacttgcccgcggattaacgtcgattacgtagacatcatcggtgacgacgaactgaatgttcatcataccgacacagtggaggtgttgtgctaatttggtggcaatggtgacgatcttatcttgaacagcagggctgaggtgctgtggtggatagactgtaatggaatcgccagaatgaacgccagcaccttcaatatgttccatgattcctggaatgaagcacgacgttccatcggagagaacgtcaacttcacactcggttcccgacaagtattggtccattaagataggcgcaccatggccagctgccaccgctgatttaataactggcgtgagctcatgatcgttatgaacgattgccatggcccggccgccgagtacaaagcttggccgtacgagtaaggggtaaccgattgcgtgagctgcttgacgggcaccggataactcagttacggtcgttccagcggcttgggcaatctttagtagacgtaaacagtccgcaaaagattgccggtcttcggtcaaatcggtagcggacacactggttcctaggacggtgactcctaatttagtgagctgatgggcaaggttgatcgcagtttggcccccaaattgaacgatgacgcccgcgggttgctccaacgcaatgattggcatcaaacgttcgattgttagtggctcgaaataaagcttatccgaggtagaaaagtcggtggagaccgtctcggggttgttattgacgacgattgcatggtagccagcttgttgaatggccttgacacagtgaacggtggtgtagtcgaattcgatgccttgtccgattcgaatggggcctgatccgagtactaaaatactgtgtcctagtgggtgactctcgttagtttgtccaaaagcagtgctgtaaaaatatggtgtaacactggcaaattcaccagcacacgtatcgaccattttataaacgaagggtaaatcagcagtcatggcagcaatggtcgctaccgaagtttgggcataatgcgccatggtcgccagactcacaccgtactttttcgccgataagaggtgttgggacgtcggcacttgcttgatattccggatgagttgggcgatgtgctgtaacttactcaagaaaaatggcgtgatttgcgttagcgtcgctaattttgctaacggccaacccgcttgcagcgccgccaatagatagaagagccgctgatctgtcgggtgggtcaattggtcgatatattcagtcgtggtgacgtggtggtcaggggtcaaggaagcttgggtcttgggatcgatttcaagcgaagcaatcgccttgagcgtggcttcctccaaggttgacccaatcgccatgacctcccccgtggctttcatctgtgttcccaagtgagcgtcggccgttggaaacttgtcaaacgcaaaccgggggattttggcaaccacatagtctaaagctggttcaaaggccgcataggttgtctgcgtgactggattcttgatctcagataaatttagaccaattgcgatatcggctgcaattttggcaattggatatcccgtcgctttagaagctagcgccgatgaacgactgacccgcgggttcacttcgatgacgtagtactgacgactattcgggtcttgagcgagttgaacgttgcacccacctctaatgtcgagggcttccacaatcgtcaaagccgccgttcgtagctgctgatattcagtgtcagtcaaagtctgaacgggggcatacacgatagaatcgccagtgtgaataccgaccggatcgaagttttccatggaacagacgatgatcttggtaccctgattatcacgcatgacttcgaattcaatttctttgaagccggcgatactttgttcaatcaagcactcggtgacgggggacatggtcaacccccgctgtaacgtttgggtcaattcggcggcattattggcaatgccgccacctgaacccccgagtgtaaaggctggacgaacaatgaccggataaccgattttttcagcaaacgacaatgcactggtcacgtggtgaacagtggtacttgctggaatcggttgatggagccgcttcataagtgctttaaatgctgcccggtcttcagcttgattgatggtggctagggaagttcctagcagttggatcttcaactcattaagaacgccagcctgatctaacgccatcgctaggttcaatccggtttgtccaccaagtgtcgggagcaaagcatcagggtgggtggcccgcagaattttagtgacactggtcaaagtcagaggttctaagtagacttcgtcggcggtggccgtgtcagtcatgatggttgctgggtttgaattgatcaaaatgacatgatagccggctgctttaaggcttagacaagcctgagtaccggcatagtcgaactcagcggcttgaccgattttgattggaccagaaccgatgacagcaatcgaatgaatggcattgtttttaggcattaacaaccgcctccttttgaattgttagtaagaaatcatcgaaaaattgcccagcttcctggggccccgggtgtgcttcgggatggaattgcaccgacattacggcctggtgcggtaggcgcaagccttcaatgctgccgtcatttaattcagtgtgcgtgacgatcagcggggtgcccttgatcgatgccggatcgacggcgtaatcatgattttgcgaagtcatgataatacgaccgtcagcgcaggcttgtaccggatggtttagcccgtggtgaccaaaggaaagctggtaagtctgagcaccataggcgagcgcaatcaactgatgaccaaggcaaatgccagccagcggataacgttgtgcgagttggcgaatggtcgctaagtaagtgtgatagtcagtcggatcaccgggaccgttggataacaaaattccgtcagggtgatacgcggccacggccttgagactagctgtaggtggaaggacaacaacgtccgcgccccgggcttgcaattcagcggtgatagctgctttttcaccaaagttgagaatcgcgacgcgtggacggatggtggtcgtcgctactgggaggggggtagccgttagtgcttggggtgcgaatgtggcgagttgcgcttcaaaatcagtgatgggatgattgctcaagattgccatctgggctcccgtttgacgaatgtgaatcgttaggtcacgagtatcgacgccttcaatgccggctacatggtggattgtcagaaaacttgccagtgattggcgactagtatagtgatcattaaaagtggccagctcgtgaacgatgatggcttgtgcgccaatcgttggtgcctgggccacggtcggatcgataccataattaccaattaatgggtaagtgaaggcaatcatttgatttaggtaggatggatcagtcaatgtttcctgataacccgtcattcccgtattgaagacgatgcgccccgcagcctctagctggcaatccccaattgccgttccaatccactgtgtgccgtctgctaaagttaagtatttgttcatcccaatcgcaccctttctgataatttggttaaaatttcattttggttaatgggataagtaaacatcattttattgtggatgtcaattaaaaatacatattaaatgcataaacaactgaataaagctaaaaacatgcaattaatagagcaaaaatgaatattttttcaataaagcttgcaattttaaagcgatgagaatatagtgtgaatcatactttctgcatgaacatgcagctaatacactatttttgaatatttgaggtgattatatgcaagtcgcgctagttggcgttacggggtacagtggcatggtgttgtaccggctcttgaaacaacatcccgagatcgatcgcatccaattatacgggcacgtgggagcaactacggtggcattaaagacggtggcagccatgtaccagaaggaaacggcggttattcgaccattcgatgcgacggcaatcatgcgcgataacgcgattgtgttctttgcgacatcagcgggcatcacgcgacaattggcattaccattcatcgctgctcattttccagtcatcgatttatctggtgacttccgcttgcatgatccagagcaatatcagcggtggtaccaacgtgatccagcaccggcgaccgctttggcgcaggcgagctacggtttagctgatatgccggcgccgttgtccacctacattgcgaatcccggctgttatgcgactgctacgttattaggactagcgccacttgctcagcaacagttggtcgaaccgacttcgattgttgtggatgctaagtccggcttatctggtgctggcaaacgagcgacagctgcgagtcattacgtcgctgtgaatgataatttgagtttatacaagttgaatcaacatcaacatatccctgaaatgatgcaacagttacagcagtggtggtccgcgatttctgcgattgaatttactaccactttgattccagtaacgcgtgggattatgacgacgatttatgccaaagcgaagtcagcattgacaacgacgcaggtccgcgcagcttttaccgcgacctatcatgagcagccgttcgtgcaagtgctaccaacggggatgccgacgctcaaggacgttgttgggtctaataactgtgcgttaggcgttgattataatccggtcacgaacaccatcgtggttgtgagcgtcattgacaatttgatgaaaggtgctgcggggcaggccgttcagaattttaatcgctattttgatttcgcggttacggccggattaccgacgttacctgtatttccctgataaggtgcaataagagaggaagttatgcagatgcaagttttaacgaatacgaagtttgaaacggttgcctttcagtggccggcaggtttttacagtgatggcattcatattggtcttcgtcgtcataaaaaagattttggttggctattttcaaaagtgcctgccagtgcggctggaacttatacgacgaatcagtttcaggcagcaccaactaagttaactaaacagatgatcgaccagggccaccaattacagggactgctgctgaatagtgcaatcgccaattcttgtactggcgagcaggggtggcagaatgcgctgcaagaacaagcctggttagcgaataaactaaacgtggagccgaacttgattggcgttgcttcaactgggctgattggtgctcagttacccatggataaaatcaaaaacggcttgccgcaattgacaccaacgaagagtgacgcggtgacctacgccgtgttaacgacagaccagcatcccaaaaccgtctgtgtgcagtgtgaactcagcggccagttagttaccttgaccggttttgccaaaggttctggaatgattcatcccaagatggcaaccatgcttggttttgtcaccaccgatgcccaaatagacgggccagttttacaggacatgctaagtactaacgttgatcagacattcaatcagattactgttgacggtgacacgtctactaatgacatggtggtcacgttggcgaatggtctggcagataatccgagtttacaagcgggtaccaccgactatgatatttttaatcaggcgttgcactatgtcttaggccaacttgccaagcaaattgccgctgacggtgagggtgcgaccaagttagtcgaatgtaatgtggtccacgccgctacaacgtttgatggtcagcaaatcgccaaagcaattgttggctctaacctcgttaaggcggccattttcggtgaagacccgaattgggggcgaatcattagcacgattggcgccactgatgcagacatcgatgtggcgacggtcgatattgaaatgaacggcgttttacttgttcaacaaagtctggccgttgactttgatatggcagcggtgcaggcgaccttacgtgataaccagattatgatcgatgttgatttacatcacggtacagcaagtggtcaggcttggggttgtgacttgacttacaattacgtcaaaattaacgcgagctatcatacttaaacggaggtggtgaaaatgacaaaattaattgtaattaagattgggggccaggcgattagccaattgagcaccactttctttgaccaaatcgcacagtggtaccaacagcattatcagattctgatcgtacacggtggggggccaatgatcaatcgactgacgactcagcttgctttgcccgtgcataaggtgaacgggttgcgggtgacggatgcggcgaccttagtgctcaccaagttggccctgctaggagatgcgcaaccagccttacttgcaaaattaacgcaacatcacctacctgtgttggggctcaatgcggcggataatcagttactaactggtgaattgattgattatcgacagctagggtatgtcggccggctcaccgctgtcaatcaagtgcaattaatgcaattgttggctcatcatatcggtattttggcccctttagccttaaccgagacgggacaatggctcaatgtcaatgcggatatggcagcgaccgtgctagcccaacaactacatgctgaaaaattggttttgctaaccgatgtcccgggaattatacatcacggtaatgtgatgacatcactatcgccacaacaagctcagcaattgattcgaacagctgtgatcaccgcgggaatgcaacccaaagttcaagctgcaattgccgcgattcagacgggagtcaagcaggctattattacgaatgcaatcgatcaaccaggaaccgcaattattcaggaggtggccgtatgaccatgcaacacgtgtttccaacctatcaacgttttccatttgccattacggatggtcagggcgttcatctgactgataatcatggcaagacgtatttagattttacggcgggaatcggggtctgcaactttgggtatcaccaaccacaaattcaggcggccgtcacccagcagttgacgcatatctggcatacgtcgaatttatacgaaaatgaattacaagatgccgttgccggcctgttagcgaatggtgaagagcgactcgtatactttgcaaattccggaaccgaagccaatgaagctgcattaaaactcgcacggaagtacacgggtaaaaccggcatcttagcttttcagcattcatttcacggtcgaacctatggcgctatgtcgatgacgggcaatcctcatattcaggctggctatgcgccattagtgcctggcatcacgtttgcaacctataatgacgacgcggctttggacaaaatcacaccagagttggcggccgttattttagaagtcgttcaaggtgaaggcggcgtctttgcgggacaaacagcttggttacaagcggttaatgcgaaatgccaagcaacgggtgttttgttgattattgatgaggtgcagacgggaatcggtcggactggttaccggatggcctatgaaggttacggcctggatcctgatatctacacggtcgccaagggcttagcgaatggcttgccagtgggggcaatggttggtcggcggcaattagccactgcctttggtccgggcagccatggctcgacgttcgccggtaatgctgttgctatggcggcggcaaaacgtgtcttgacccaattaacaccggcgctgttaacgacggttcgggcccatgccgaacttgtctggcaagccctagcgactcaagtcgaaccgataccggtagttaaacaaatcacggggaagggcctaatgattggaatccacttagatgaacaaatgccggttaatcaagtcattatccggctacaagtagaaggcttattgacgttatcagctggcgataatacgttacgtttgttacccccaattgtgatgcaaccggccgatttattagctgggattgccttgattgcaaaggtactgacaactttgacaacggaggtcacgacgaatgaataatcaatttgaaggtcggtcattcttgaaggaaatcgactatacaccaacagaattagcttacttaattgactttgctagtcacttgaagacccttaaagcacaccatatcccacacccttatttacaaggaaaaaatattgcgttgctgtttgaaaaaacgtcgacacggacacgttctgcgtttactgtggcggctaatgatctgggcgcgaatccagagtttttgggtaaggacgacatccaattcgggacgaaggagtcagttgttgatacggcgaaagtactggggtccatgtatgatggtattgaatttcggggctttaaacaaagcacggtcgaagacttagcgacctatagtggtgtgccagtctggaacggattgaccgatgagtggcacccgacgcagattttagcggattttttaacattaaaggaacattttggtcatttaaaagggttgacgttagcgtacgttggtgatggtcgcaataatatggctaatagtttacttgtggcgggagcgatgctcggcatcaatatcgctatcggggccccggtagcgttacagccagccccagcagtggtcgcgttggcccaacagtatgcgcaggcagctgggagcacggtcgtgattacggctgatccgcaacaagccgttactcaggctgatgcgctttatacggatgtctgggtctcaatgggcgagcaggtcgactatggtgagcggatcaagcaactattgccgtttcaaattaatactgcgttactcgcagctactggcaagtcatcgacgattgtcatgcattgcttaccagcactacacgatctaaagacgcagctgggagccaaattaggcgaacagtacggaatgacggcgtttgaaattacggatgatgtcttccagagtaagcaggcggtcgtctttgaagaggccggcaaccggatgccagcaattaaggcggtaatggcggctacattaggtaacttatttattcctaccagcattttcaattagcaagcttgcgggaactactagagcgtgctacgattatattcgctttgtttcaatcaatacgtggttcgtaaccatcccacgttaaaaaaactaggaggaattaagcgaatgacacaatcaaaaactcgaccatggattatcaacgccctagtcgctgcaatgtatgttgtactatgcctaggccccgcagcttttagcttagcatcgggcgcaattcaattccgcgtttctgaagggttgaaccacttagccgtgttcaatcgcaagtatatttggggaattgttgctggcgttattttgtttgacgcttttggtcccggtgcgagtctcctcaacgttctctttggtggcggccaatcattattagccctgctggtattgacgtggttggcccctaagttgaagacggtttggcaacggatgttactgaatatcgcgctattcaccgtttcgatgtttatgatcgcactgatgattaccatgatgagtagcggcgtcgctttctggccgacgtatctaacaactgctttatcagagttgattatcatgagtatcaccgcgccaattatgtacagcttggatcgggtcttgcactttagtgaccggattcagtagggtgtgatttttacaaatcagactaaaaaccgttatttcgatgaaggatgagtcattgaaataatggtttttttgtcgagtcattacgatgtcagttgaacaaaataatctaatcgactcatagtgaagttggcgatgagagttcattatgggcagatatagtgcataatgactggtgtttatttcagaacccagacaattatttgaagtaagcacgcgtataatcgttttcgccaaccgcatgatagctgacaccatttaaattagaatttacaaggtgactttcagtcatgttgtaaagcggtacgactgctgctgtttggttgagacgtttggcggcagttctcatattttgccagtatgattgtgtgttagttgcgttctggttgtgtgcagcggtgatttgttgattgaaaacagtgtcatcatagtgcccgtagttttgcggattgttctttgtcagaatgtcgaaaaaggaaatcgggtccgcgtagtctgctagccagagtgtataagtcaaatcgtaatttccgttagtaactgcttcgccggaggcctttgaaggtatcgctgaaactgacattttggcatgtttcaggttttgtgctacagcggcttgaacaaactggtcaatattcttagcgaccgtcgtgtcatcactaactagctttaatgttacagaagaacggtcaagttgcttgagacccttattccataatacttgtgctttagcaacattgtgtcggtaggtgctttgagtttcagtaccaaaatccttgcccgtagtgggatcggtggttaaacctggtgtgacataattgtaagcaggtgttgaaccatcactcaaaatatttttggtgagtgtttttttattaagcacaagattcaaggcttgacgtaaatattgattgtttaaagcccgatttttttgcatgttgagacgtaaataataagtgccagctttactgacgtgtttcagatgcgagtcattttgaacaccctgcgcggtgacgccggtgacagtagtgtcatctaatttattttgtgagaagagattatgggcagttgtggagtctttgacaacttgcattgttattttatttaacttgatgtcacttttatcgtaatagtatgtattttttaacaaattccaagaatcattagtcccgttccaacctttaacggcgaacgggccattgtaggccatttttgtactagtagttccgtaatctttcccgtatttggacaccacttgatgatcctgggaaagaaagcgggcatggtgagcatcttactcaagtatggcatggcgtggctgagcgtaacttttaaagtgtgcttattcactgcagtaacgcccaatgatttaacagatttatgtccggctgaaatttgagcagcgtttttgataccttcgtatatgtaactataaccagaggtagaagtggcactgacagagcgttgccaagctgttacgaaatctttggcagtgacggtgtgaccattactccactttgcatttcgtcgtaagtgaaaggtgtaggttttgccatgatttgttggtttaacgactttagtggccattgcaccgaccactttattctgagcgttcatgcgatagaggccttccatggattgttgtaagacgttccattgtgtaagtgtggctgtatttgaggtatccaatgaggttaattcactatcctgcatcaaatgcagggttttcctggtggttgtgacattggcatgtgcttgcccacaagcggttagactacttagtactagtaaaaggcaactaatagttgtcaattttttcatcaacattagcgttcctcctcaattaatatgctgtaaattgattggtttcgacatcggtgagatagcgtctcaagctatggaagaaagcggtgggattatctacactatgacaatgaccaccatctggcgttaaagttaaccgtgcctttggaagagttcgctgcatacgccgggcaactgatagcggcatcgtgtcgtattccccaaaagtgagtaaagtaggtgtcatgattttatggaggtttgcacgttgatcccagccatttaatgccccaaccatcacgaattcgttattgccctgaaaataattataaacaggggtagctagtgttgagactaattgacgaggcgcattttccggatgacgacaaacgaagtgccggttgagagtcgtgacaaggcttttgtattctggatcatcaaaggcctccgcgttttcaatatcttgcatatagctaacttggctcgctattaacgtttgttcgcgcaatttattgacgtgtggtgtgtattcagcgatgttatcaatcatactcatgataattaagcctttgaggtgctgaccatatttcagagcatattcttgagccaataagcccccccacgagtgaccaagtaagtaaaagtcttcgagtccgagctgctggcggacttcttctaattcagacaaataataatccaaagacaagaactgttgattttcaggccttgaaaagtcaggttgatctgagtaaaaggagcctaattgatcatacatgctgatttgaaaattttcttcacctagctcagtggcaaagttttcaaattcagtatgattactaccagggccaccgtgaacgcataatactttgactggcccgtgaccaactgtccgagtaaataaatgaaaaccattttttagctgtattaaatgagttcctgttaacatagaaattcctccttcgattagacaataaaaacgccctataccaatcaagtagttgattgatatagggcgtttccgcggtaccacctattatttgccagtaaactggcctcacttcacgcacggtaagttaagtgacgatgcgctagcatgataatggatgctgccattaagtactcacaaataatgatcgcacttaccgtgattaggggattttcacaagatagcaatatgaattcctttcaccaaccggaacctctctgaacaattgcttaagtgctactttcctaatcgtcgcgtttaattattttctaatctttatttaatgttgactactttatcattgactattatgtttgtcaaacgattttagataaatgatattggtcgttaaaattagcaggtagatttaaatagtttgaaattagtcagcgataatttaatgcttcatcaagattccagtgtgtgttctactaagacttccggagctgggtgccaattgctggaacacagctgacccgaacacgtttcgtcaatatggcattagggagtgaacggccagcatttgagacgcgatattttgactcaaatctgcgcccaccacgttccgacaattgacaaaaatgcctgtaagtcggtggtaggacgcttcagccagacaggtttacgctaattcgaactgttttcagcagtcttaagctggtcgcttttgaactgaaaattcatctcataaaaaaagccccaaggtaacctcggggcaactgtgattattcagcttgtaaatcttccacttcgatgactttaaattgtttgcgattcaagttgtcgataattcgtttgagcttttcactgtcgacattttctggcaaggtaaagagcgtccgataaccgagtgtcccgttttggacgtctaaggtcaggcagccggcgattgaagtatatttcgtgataatcttagccatggctgcaagatcaccacgttcaccaacggagacaactgttaaaacatagctaccaacattaacgttccaagattgtgagagcatgtcgagcagacgcgtatgagtgagaatgccatagaaatagccgtgttcatcgagcaccgcaatgtatggcaaatctttgatggagaagaagatgttgtagaaggcggagtcgacttgaatcgttttcgtggcatttttaagcagggtcgtcacgggaagcgacatgtcgccgccccgtgacttgtgccgatagatgtgcatcttatagatgttgccgcggaagatatgaccggtttcatctaagattggaatacagcggaagccggaatcctccaagacttttaaggcgtcctctaaggtcgcgtccgccgtaatggtgacgaggcgttctttaggctttacgagtgtttttaatagcatagcagttggtcccccagatttattagtttgttttaataaataataccataaaacgaccgcttacacgtatcattatgacatcaaacgacggctaaaagggatgaaaaagcgggcctgataacattcagaccggcttggttaaattagatttaaattagaaaacaatgactggtgttccgactggcacggcagcaaaaacttttttcatgacagaaggtggggtgttcacacaaccatgcgagccgtgcttcttgtaccaagtaccaccatattgagtttgccatgaagaatcgtgaattccttcgccagtgtcatcgaacggcatccaataagaaactggttgggaataacttgagccatcgtcattatcacctttaagggtcgcgttcttttccttattccagatgtaccaaacacccgttgttgtagcgtgtttaccgggctttccagtaacgatgtccgttgaaactttgagcttcccatcaacgtagacgtacatatgctgattttctttatcaacttcgacgtaggtgttgccgatgtcggtgcccttgttgttatatccggaaccactggtgattggtgagcgggtaaagtccttgcctttcaaaatttcagtagcaagggctttggcctctgcttcggtcttaatggtccagccataaaacccaccgctgacggatacggtcccacgcgccgtactcttgaactgacgcgtcgtatgataggtatgatacttatcattcaattgcttcacgtaagtcagaacagcgttttggtctaagctcactttgccttgcttatcgactttaatccaactgagaattaggtcgtgaggaatcgtgaatttatgaccgttgatattataggtggccttttcggtagcgtatttcgctgattttactttggccgtctttaaactagcactcgtgctggtaacggtcggagtgacgtaggcgtctttaagggtgatatgactgtcaccattactaattgctttggtgacgaccgtcttaagtttagcttgatctaattcggttccttgaacttctttcttaatctcaacttggttatgttgataaactaacttggcgttttcagtttttgttcgtttggtttgattggcagtcgtggtgattttttgtagtagggttttcaaatcagtgtgattgatggttagttgtccaaccgctgagctatcatcagcctgagccgattgcaatagtgcaaggggccaacgccagtagttttgtttggtcactaatttggttaaatcttttttagtattgattgtaataccggctgatttgctggtaaatgagtactttgtttggccgttttcaataattcgataagtgcgatgttctaaagcgcgattaactttcggtgctgcttgagcggcggttttaccactgacgtcaacaccagcgaccgacgtattactgaggaacgtttgttgatgttgccagattaagctcgtggcaacatatccgatgacgaggagaccgaggatactgcccccaatcataagtccacgtttatgtttcataattaagttggtcctccatatattcgtaatattctcaccttataacagaagtgagatgagtgcaaacttcaaggccggtaatcgtgataagaaagttttaaaaatagcctttagtgcatgttgcgctttaatgaatcgctaaggtaccctcaagcaaacaaaaaaacgcccgtctgctatagacgagcgttcatcatacatttaatcgtatgaaatgattatttattttctaattcagctaaaccgtcgttaagcacttttttcaaagttgcggcggaatcttgcatcttcttgagttcgtcagctgaaagtggtgattcgatgatttgtttcaaaccagttccaccaatcacagccggagtcccgatataaatgtcgtttaagccgtattggccgtccatgtaggcacctactggtaaaacggcattttcatcacgtaaaatggcttgggaaatccgcattaaagcagtcccgataccgtagaacgtggcacccttcaagttgatgatgtcgtaagctttgttacgaacaccatcttctaacttggctaaatcttcgtcagaaacgccttgttccttagcgacatcacgaactggacgtgtcccgatggttgcagttgagtaagcagcaaattcagaatcaccgtgttcacccatgatgtaagcatcaacggaacgaggatcaacattgaattgtttgcctaacgcaacgcgtaaacgtgaagagtctaaggaagtccctgaaccaatgacacgatcctttgggaaacctgagaatttccaagtagcgtaagttaagatgtcaacagggttagcagcaactaagaagatgccgtcaaagccggagtcaacaactggtttgacaatggatgataggatatttaaattcttgttaactaagtctaaacgtgattcaccaggcttttgaggcgcaccggctgtaataacaactaagtcagcgtccttacaatctgaatattcgcctgagtaaatcttcttgggagcggtgaatgcttgggcgtcttcaagatcaagggcgtcaccctttgtccgatctttaacaacatcgacaattacaaattcttcagcaattccttgttgtgccatggcaaaagcgtaactagaaccaacagcgccgtcgccgactaacacaactttttgatgatttggcatgcttgacaaaataagtcatcctctcgtagtgaaaatttagtttttacggttaaagtataccatgtttgtgcaaaataagtgttagattgagcatgcttttaatacaattattaacaatgtccgcaaaaccctttggcgggcgtcaataagccctttgtggtatacttatcgcacttaataaacgctaacttttgaacacttgactggcgggcgcgtcggtcacggtgtgagtagtggtgccaatacgacttaggtggtatcgttactcagagttgccgaatcgggtcgattaccggttcggcctgttttggtatgcaaagtaataggagaagataaaattatgaaaatgatcgttgggttaggcaacattgggcggcaatatgcccagacacgtcataatgttggttttatgattgtggacgaattagctagcaaactaaacgttacgtttcaaacgagtaaatttgaagcacaggtggcaacggcttttcaagacggtgagaagattttactggtgaaacccgccacttatatgaatgattctggacgagcggtgggaccgttgatgagctattacaatgttgatcctgctgatttgctcgttatacatgatgatttagatttgccattaggaaaagtacgcctcaaacaaaagggatcggcgggtggtcataatggcatcaagagcattattagtcatgttggtgatcagcacttcaagcgcgttaaagttggtattgaccatcctcagaagatgagtgttgttgattacgtgttggggaaatttacgccagccgaagtggcgaagtttgacgatgctaagattacggcgctagcggcggtcgaagcttggttagcaaatgatgattttgcggcagttatgaatcaatataactagcccgggaggaaacgacagaatggatattgaaacgattgttgagcaaacgcccgactttcaaacaattttagcaggtatcagcccgcgtagtcggcaactaatcaccggattgaacggttcggcacgaacggtttatttaagcgcgctatttcaccaattaacgcattcattactgatcgtgaccgataacggttttcacgcgagtcagctagtggatgatttaacgagtctcttagatgaagaccaagtttttttattcccagctgaagaaatgattgcgacggaggttgcgacaagttcaccagagtcacgagcgcaacgggtccaggctttaaacgccttattgcgtgacattccggcagtgatcgtgacctcggttgcaggtgcccggcggttcttgccgcccgtcgcacaatttcaagcagccacgttaccggtagccgttggtcaagatattgatttggaagacttgcagcggcaactacacgacatgggttacgttaagaaaaagttagtcgcacgcccaggagattttgcggtacggggctcaatcgtggatatttacccgttagatgcggactaccctttacgactggacttctttgatactgaagttgatacactgaagtattttgacccggaaacgcaacgttcggtggaaaacttggatgagtatacgattttaccagctaccgactttatcctaacatcagctatgctgcaggccggggcacagcgtcttaaaacggcgattgcggctgaaagtaagaaactcaagccagccgaacgccagactttggccgataatttagcacaacctttagctgacatggaaaaaggaattatcggaaacgatttattattatatggcgattatttatacgaccggaaaacgagtatttttgactatgtggccgctgacgggctcgttatcttcgaagaatattcgcgtttgcttgatagtgagcagcagttattaacgcaagaagctgactgggttacggaccaattggcacatcaccgggtgttggcaactgcgagttacggcaatgatattcgggatttgctccgggatgaccaacatgcacaactcttgatttcgctgtttcaaaagggcatcggcaacgtcaaactagcgcaagtaactaacgtgcgcacacgcccgatgcaggaattttttgggcagctcccagcgttgaagaccgaactggatcggtggcataagcttaaacagacggtggtcttgatggtatcagaggctgagcgtctgacaaaggtcagtgatacgcttgatgattttgaaatcgaagcggtcatgactaaggccactaatttacaaccgggtgcggttcaaatcgtgcaaggtagcttgcaaaatggatttgagtttccggatggtaaattagtcatcgtaaccgagcaagaaatgttcaagaaggtggctaagaagcgtccacgtcgtcagaccttggctaatgccgaacggttgaagagttatacggatctcaaacccggcgattacgtcgtgcacgtcaatcacgggatcggaaagtacgttggtatggagacgctggaagttgatggtgtccatcaagactacattacgattgcgtatcaaaataatgcgaagatctttattcccgtgacccagttaaacctagttcaaaagtacgtttcgtcagaatcaaagacgccacgcatcaataagttgggtggtaccgaatggacgaaagcgaagcgcaaagtcgcggcgaaaattgaagatatcgcggatgaactagtcgacctgtatgccaagcgagaggcggagaaaggttacgcctttccaccggacgatagttatcaagatgatttcgataacgattttccgtacccagagacgccggatcaaattcgtagtattaatgaaatcaagcatgatatggaacgaccgaaaccgatggaccgcctattggtcggcgatgttggttatgggaagacggaagtcgcgttgcgggccgcgtttaaggcgattgaggccggcaaacaagtggcctttctagtgccaacgaccattttagctcagcaacattatgaaacgatgctgaatcggtttgaaggctacccgattaacgttggcatgctgtcacgattcagaacaactaaggaaatgaaagagacggtccaacagttaaagagtggtgaaattgacatcgtggttggtacgcaccgcttactgtctaaggacgtcgcgtttgctgatctgggcctgctcattattgatgaggaacaacggtttggggtcaagcacaaggaacgactgaaggccttgaaggctagtgtggatgtcttgacgttaacggcaacgccgattccgcgaacattacacatgtcgatgctcggtgtacgggacttatcagtgattgagacgccgccaacgaaccgttatccgatccaaacgtacgtcatggaacagaattttggcgtcattaaagagggaattgaacgagaaatgcaacgtaatgggcaggtcttttatttgcataaccgggttcatgatattgataaagtcgttgcacagatcaaagacttggttcccgacgcggcggtggcccatattgatggtcagatgcctgagtcacaactcgaagggattctctacgatttcattcggggtgagtacgatgtgttagtgacaacgacgatcattgagaccggggttgatattccaaacgtcaacaccttatttgtggaaaatgctgaccggatgggactgtcacagctataccagttgcgtggccggattggtcggagtagtcgggttgcctatgcttactttacttatcagcaaaataaagttttgacagaagttggtgagaaacggttacaggccatcaaggactttacggaacttggatctggctttaaaatcgcgatgcgcgacttgtcgattcggggtgctggtaacttgttaggtaagcaacagcacggctttattgactcagttggttatgacctctatacccagatgttgtcagaagcagtggcgaagaagcgtggtcaggcggctaaagttaagaccgatgccacggtcgaacttggaatcgaagcctacttgccgaccagctatattgaagatgaacggcaaaagatcgaaatttataaacggattcgccagctggagaataatgatcagtacatggaagttcaggatgatttaatggatcggtttggtgattatccggtagaagtcgctggactattagcagtaggtaagctgaagttactggcggatgacgcgctgattgagaagattcagcgtgacgatagtgagctacacctaacgttatccaaacaagggacggctaagctagatactaaagatatttttaaggccttggcaaaaacaaaattaaaagcgacagttggaattgatgatgataaaatgaaggttaaattagtcattcagccaaagatgcaacaggatgagtggctggcgcaattaacacagtttgtcgaacaactgagtttgatcttagccgaagacgatgtcgctagtgcgtcttagctcggtagttgttgttatgaagcatggttgcacggggtgggttaagcgctatcgagtggaaccaatggcaaatagcaggaattatcgtctgatggggcgttgtcctggctagtcagggcgcggctcaaatgaattagtatgagacaccgagttgctcggtagaagggatttgttatgccaaaggatcacttgaacaccgtgttcaaaggtgcgttaattttatcgatatcatcattagtcgctaagattttaagcgcggtataccggattcctttacagaacatggttggtaatacgggattttacgtttatcagcagatttatccgctgtacggcattggcatgacctttgcattaaatggatttccaaattttatttctaagttagtggcagaacagccagacgaaacgagtaagtcgctgattgcacggcgggcgtttcatatcttatccggattatcgttggtcgtctttttcggcttgcagcttggtgcaacgtggattgcggcccacatgggtgacgttaatctagcaccaatcattagtgccgtggcttggatgtttgtctttatgccatggttagcaaccggccgtggttactatcaaggaaaatttttgatgggaccgaccgcagtgtcccaactgatcgaacaggtcgtacgggtcgcaattatcatcatggctgcatatttcagtgtccgtctcggttgggataattatcggatgggaacgtgggcaatgagttcagcgccactagctgcaatctgttcatcactgatttttactgcttttggtctacgctatttattggcgcccgcacccgcaccgacccacccgttacctagttatcgcaaattaaccaaaagatttgtaattgaaggtgggacgctgtgtcttgtcgccgctgttgttatcttactgcaattagtggattcatttacggttatgcggggcttggtgcatcaaggtcagttaccagaagtagccaaggcactaaaaggggtctacgatcgtggtcaacctttggttcagttagggttggtggtggcgacggccttttcagcaacgttattgcctgctttgacggatgcgttagccaagcgtcaaccgattgaattcaagcgccagacacaggcgatggttcacgttagtttagcattatcaatggcagcgacggtcggtctagttgcgttgatgccacaaatcaatcgcttgttatttggttcattagaaggaacaacggcattgcgaatctatatcattagtattttatttgcagcgttgattacgacgtatacaagtgtgttacagagtttgaacgaatatacggccatgatcattggcatcattgctggattagcgacaaaagtgctggctaattacatcttcgtggtccactatggcatcaacggtgccagtgcggtgaccgtattgagcttggccgtgatgtttgcggtcatgtggttaggttcgccggaagacttgcagcgggtgctattagagagtggttatttgataaaattgctcgcattaagtgccgtaatgggtatcgtggtgatccttagttgtcatcaaatcaccgccttagtaggtccgatactagcgaatacgcgtggaatggctggaattataacggtgattggggtgctaatcggtgtgctggtgtttgttgccggggccgtctatgcccgattattcacgattcgcgagtggttagtgttgccatatggaaagcggctaattaaggccgttgcaaaaggaaaggaacatcattcatgagtatgcgtttagataagtttttaaaggtttcacgaatcatcaagcggcgctctgttgctaaagaaatcgccgataaggggcggattcaaattaacggtaaggtagcgaaatcttccagtaatgttagcgttgatgatgaactaattattagttttggaaataagacattaacagtcaaagtgacgcagttattggaaacaactaagaaaaatgatgccgagctgatgtatgacatcatcagcgaagactacaaaacggattatcgccaaccatttagtgattaggtcagtgtatccgttcatcgaaatggtcgtaaacgttgacttaatcagcatgatgtcgtttacaccggccgatgaagttgttataatttaggcaacctaatttgaaaggactggaccaacatgacgaacgggtcacgtaacaaaatcaagcagttagataatgattatattcgtcaagttgccaccgacgagcatgggcaagcccagcgtgttgcacaagtacggcggcgacggtttattttgattgttgcggtgttcggagcattgatactattctttggttttcagttgattaatacgcggtccaatctgcaccaggtaaaccgtcaagttgcgaccagtcaagttaaattaaaaaaggtgcagcaaaaaaataatcaacttgagagtcagatcaaacagttgaataataaggattacttacaaaagttattacgttcaaagtatgattatacgaagagtggcgaaacggtctacagcttaccaaatgataatgctgccgatgtaactgccaactaatcggggttgtggtctgctttatatgagtagaccactttttattaattgcttaaatgtataactcaacgtttcacaaagtatgctatactaaaaccattatttcataggaggaacaactttttttatggcaattgaagtaggtacaaaagtcactggtaaggtatctgggattactaattttggtgcatttgtaaacttgggtaataatcaaacggggctagtacacatcagtgaggtttccgatggctttgtaaaggacattcatgatgtcttgagcgtgggcgacgatgttacagtcaaagtgttatccgttggtgatgacggtaagattggcttgtcaattcgtaaagcggttgacaagcctcaaggtgaacatgaacatcatggcaaccatcagggtggcaaccggccaaacaatcatcaaggtaacaaccatggtcatggtgaacgtcaaagcaatggcaatcatcacgatcggtcaaataatttccatagtcgtgggggaaatggcggcggtcgttaccaatcacgacaacatgaacctaagaagcaggactttgattcattgatgtctggcttcttaaaagatagcgaggatcggctagcaaccttaaagcgtaatactgaaggtaagcgtggtggccgtggtggtcgtcgtagctaaacttagtgacttgccattaatctagttaaattttgaagcacggtgcggctatttagagtcacgaccgtgctttttttattgaaaattgccgattgttcaaggtcagtcagcgagacacgttggaaacggtgtgagttaccgtaaacttgcttggctagttcatcttatgctatccagtcggaataatgttcaaataggtgacaaacgaccagccaactaatcggcaagttttaacaataaataaatccaatgtatttataatgaagttagatgggaggttaagatgacaccaattcaaaagttcaatcggcaattagctgcagccaaactgttatcaccacagcaaacagtggtggtagcggtgtcgactggggtcgattcaatggtattgttgcatttgttgcaacgattgccagcagcggaacggccacgggtagtggtggctcatgttaatcatcatttacgcgaacaaagtcaaatggaagcggactacttgcgacaatattgccagcagcaaaacttgaagctagtcatggccgattggctacccgcggcacatcccaagagtggtattgaagcagctgggcgtcagtttcggtaccatgtttttgctaaggtgatgcgggaaaatcgtgcaacggcagttttgactgcgcaccacgccaatgatcaagtcgaaacgtatctgatgaagcttgcgcgtggtggcgacatctcacaattgacaggaatcgcaactagtcggccctttgcaacaggccgattaattcggccgttgttgacgtggtcgaaagatcagctacgaaactatgctgccgagcagcatgtcgtttattttgaagacgttactaatcaagatgtggccttgacccgtaatcggattcggcaccgtgtcgtgccagaacttatgacggttaatccccagttattaaagcatgtggccgattaccagcaacagttgacaacgctgttgacggctaaaaagcaaatggtcacggtactactgtcgcaggtcgtaacggccacaggggcgttggttgttgatcagtggggcgcactcccgagccagtggcagttagccgtttttgcgacgtggttcgagcagcagacgcaacaactattcaccgagtcgaagttacaaccgctggtctcgtggggacaacggacgcggcctgccacgagtagattaacggtaaacgcggcctgggagttgtaccgtaacgctggtatcattgaagctttgccaataaaaaaaaggggtaaaaagttaatgccccgtgaaaaaattatggtagacttaaaccaatggcagaaaattactgcaacccaaacggtgggaatctttacgcgggtgccaaatgttgtcagtcagccattttggttaacagaagccgattggccgctagtgtggcggccgtggcaagctggtgatcgaatcgttctcaagggcggtggtcatcagctggtacgtcgactgctgattgatcgaaaagttccggctgaacggcgtgaacaggtgcaagtgttagtgaatgctcaagggaacgttctgtgggtggtcggtcataagtttagctatcgtacgactggtacccagacagtatttttagccttaaaacacgagagttgaaaggagtacatctgaaacgatgaacaacgacattgaacgagtactttatagtcgcgaggatatccatcaggttgcacaaaaattaggaaaagaactcacaactgcatatgctggtaagaacccattaattatttgcgtactcaagggtgccgttttatttaccacggacattattcgtgaaatggatatttacgcggatcttgattttattaatttatcaagttacggtaatgaaacgatctctagtggtgaggttcaactaacgaaggacttagatgctgatgtgacgggtcgtgatgtgttagtcattgaagacatcattgataccgggcggacgttgaagttcttgatcgatttgttgaagcggcgcgatgtgaactcagttaaggtctgcacgttattggataaaccagctggtcgactcgttgatattaaggcagattatattggttttgaagtaccgaatgagtttgtggtcggttacggtcttgactatgcagaacgctatcggaacttgccgtacgttgggattttaaaacctgcgatttacgagcataaataattggtcaatgatagtcaaatgtgctattatttagactatcgaagtactgtatataaaagtttcgatgaaggaggcacatatgaacaatcgacgcaatggactctttcgtaatagcttattttacattttgatgtttctgagcttgatgggaattatctactttttctttggcggtaattccggctcacaaacgcaaaatattcgttatagcgaatttgtcaaacaattagataagaataacgttaaaaacgttagtatccagcctagtggcggcgtctacaaggtaactggttcataccggaaagcacggacgacttcttctgcaaacgcccttggtatcaagagcgcatctacaaagacgacgtcattttcaacaacgatgttggaaaacaactccacggttgaccaagtttctaagttggcggctaagcatgacgtcaaggttacggctaaggccgaagaatctagcggcatctgggtcacgttattaatgtacatcgcgccagtcatcctgatgttattcctcttctatatgatgatgggacaagcaggacaaggcggcgggaacaaccgggttatgaactttggtaagaccaaagcaaaaccagctgatagtaagcaaaataaggttcgtttctcagatgttgccggtgaagaagaagaaaagcaagaattggtcgaagttgtcgaattcttgaaagatccgcggaagttcgtgtccttaggtgcacggatcccatctggggtactcctcgaggggcctcctggtactggtaaaacgttgcttgctaaagcggttgccggtgaagctggtgtcccattcttctcaatctctggttctgacttcgtcgaaatgttcgtcggggttggtgctagccgggttcgggacttattcgaacaagctaagaagaacgccccatctatcatctttattgatgaaattgatgcggttggtcggcaacgtggcaatggtatgggcggcggtcatgatgaacgtgaacaaaccctgaaccaattgttagttgaaatggatggttttacaggtaatgaaggtgtcatcgtcatggcggcgacaaaccgttctgatgtacttgatcctgccttacttcgtccaggtcgtttcgaccggaagatcttagttggtcgtccagacgttaagggtcgggaagccatcttaaaagtccatgctaagaataagccattagcagctgacgttgatttgaaggaaattgccaagcaaacacctggattcgtgggtgccgatttggaaaacttattgaacgaagcggccttgttagctgcccgtcgtaataagaagcaagttgacgctgcggatctcgatgaagcagaagatcgggtcattgccggacctgctaagcatgatcgcgttgtgaataagcatgaacgggaaaccgtggcttatcacgaagctggtcatacgattgttggattggtcttgaatgatgcacgggtcgttcataaagtaacgatcgtgccacggggtcgtgctggcggttatgccatcatgttaccacgtgaagatcagatgttgatgtcgaaacgtgatgcgaaggaacaaatggctggtttaatgggtggtcgtgctgctgaagaaattatctttggggcgcaatcatcaggtgcttctaatgactttgaacaggcaacgcaaattgcccgggcaatggttactcaatatgggatgagtgaaaagcttggtcctgttgagttagaaaatgccaaccaacaagcagcttaccaacagggtatgggtgcgagtgccttttcacaacatacggcacaattgatcgatgatgaagtccggcgtttgagccaagaagcgcatcaaactgctacggatattatcgagtcacaccgtgaacagcataagttaattgcggaagccttattgaagtacgaaacattggatgaaaagcaaattctcagtctgtttaagactggtaagatgcctgaaaaggatagtaatgaatttccaagtgagaaagcagctaccttcgaagaatccaaacgtgaattggaacgtcgcgaagctgaaaagcacgcgcaaaaccaaagtgcggatgataagcaagcagactcagctgacactacgactaatgtgagtgttgctgaaccaagtttcccaagtgaatcggatgctagttcagaagttagtgctgacagtagtgtcaattcaacagctaattcagccactgaatcagctaccgacagtgatgtcgcaacttcagccaccggtttaccaaatgctgaaagtgccacaccatcatcgcaggatgatactaattcgcaagcatagtattgaataaagtaaaatgaaggagctgggactttgtctcggctccttttatgcgttatgatatttcaggaaaataaatcaattgcgttaattcggttatgagcgtcgggtcgcaattaaagacggattgagataggagtatgattaaatggcagattatttagtaaaaagcgtcgcgggtaatgagatgtttcgagcgtacgcagttagcgcaacgggcgtggttgctgaagcccaacgccgacatgatacctggagtgcagcatcagcagcgttaggccgcagcttggttggtacgttattattagcatcatcggttttaaagggtgaagaacaaatgaccgttaaaatcaacgggaacggtcctgttggtggtatcgttgttgatggcaatgctaaaggtacggtcaaggggtatttacagcacccccatgtgcacttgcctttgaatgataagcataagatcgatgtgaaggcggctgttggaactgatggctttttatctgtgactaaggatcagggggttggggatccattcaccggaacggttgcgttagtttctggtgaattaggcgaagactttacgtattacttagcacagtccgaacagattccatcagctgttggcttgtcggtgtttgtaaatgacgacaattcgattggagttgccggtggctttttggtgcaagtattgccaaatgcgacggatgaagccatcagctcgctagaaaacaagctcaaagacatgccattagtctcccaattgatgcgtgatggtaagtcaccagaagatattttggatttattatttgatggtgacgttaaggtattagataaaatgccagttaagtttgaatgcgattgttctaaagaacgatttgccgaagcactaatggctttgcccaagcatgaggttcaagcaatgattgatgaagatcatggtgccacggcagtttgtcatttttgtggggaccagtatcagttcagtgaacgcgaactagaagcagtgctctcacggtccaagggtgacgcttaatgaatcaagagtggcagatcggtgatgtgacgattcccaatcgtgtcgtagtggcaccgatggccggcgtgactaacgcggcctttcgagtaatctgcaaggattttggtgcggggttagtcgtttgtgagatgatttctgatcgcgggatcatgtatcataatcgtaagaccctggaaatgatgtttgttgatccaaaagaacatccaatgagtattcaaatctttggtggttcgaaagcaacactggttcaagccgcccagtttgtcgatcagcagaccaatgctgatattattgatattaatatgggctgtccggtgaataaagtggttaagactgatgcgggcgctaagtggcttttaagtccagataaagtctacgagatggtcgcggctgtgactgctgcggttaataaaccagtgacggtcaagatgcgaactggttgggacgcagagcacgtatatgccgtcgagaatgcgcgggctgccgaacgagctggtgcagctgccgttgcaatgcatggacggactcgtaagcagatgtaccaaggccatgctgattgggacgtgttaaaacgggtggcggatgccctcacgattccattgatgggtaatggtgacgttcagacacctcaagatgctgcgcggatgcttgatgaagtcggggccgatgccgtcatgattggccgggcggtagaaggtaatccgtggatgcttacccagacagtacactatttagcaaccggggagttactaacgccacccacaccgatggctaagatgcaaacggcaatggaacatttgcagcggttagtggttttaaaaggtgagcggggcggatgtcatgaattccgtgaacaagcgccgtactatctaaaaggcatcccaaggtcggcacggaccaaagtggctttaatggaggcaagctcgttagcagaaatgatgcgcattttaacgcagtttcaggagcagacggcaacttatttggctagtcacgcggtaaagtgaataattaacttgcattttggcggcgtgattgtcaaaattaacatgtagtgattgtttaggtacggaataaatctgtacgctaactagaaatggaggaacactagtggcacgacaagaacagacgatgaacgaccaactgaaggttcgtcgcgaaaaaatggatgaactgcgtgaagaggggattgatccctttggtcaccggttcgaacggactgatttagcccaggacttgcaagacaagtatggggatatggataaggacgagctagacgctaaacaagtggtggcaaccattgctggacggatgctagctaagcgtggtaagggtaaagtcggttttgctgatatctgggatcgctcaggtaagatgcagttatacattcgtaaagatgtagtcggcgaagatacttaccatatcttcaagcgttctgatattggtgatttccttggaattaccggccaagtttttaagacggactttggcgaattaacgattaaagtaactggtttaacgttcttatcaaaggcgttacgaccattgccagataagttccatgggttacagaatgtggaacagatctatcgccaacggtatttggacttgatctctaaccgcgatagctttgatcgtttcttgaagcggacgaagatcatttcagcgattcggcatcatttagacgatcaaggcttcacagaagttgagacgccaatgttgcataatcaagctggtggtgcggcagcacggccatttgtgactcaccacaatgcgttgaacattgatctctacttacgaattgcgttggaattacatttgaagcgcctgatcgttggtggcatggaaaaggtttatgagattggtcgggttttccgtaatgaagggatggaccgtgaacataatcctgaatttaccatgatggaaacttatgtcgcctatttcgacttccatgatgtaatggctgagacggaaggtatttttaaagccgcagcgcaagccgtaactgacgatggcattgtcacttatcatgatcaaaaagttgatttcaatcaaccatttaagcaaattcacatggtcgatgcgattaaagaaaagactgggattgatttctggcaaccaatgtcaattgaagatgcacaaaaattggcggatgaacatcacgtgaagtatgaaccatactggaaagttggtcatatcattaatgcgttctttgaagaatttgttgaagacacgttgaatgaaccaacctttgtttatggtcatccagttgaaatttcgccattagctaagaagaatgaagaagatccacggtttactgatcgttttgaactcttcatcttaggtaatgaatacgccaatgcgttcagtgaattgaatgatccaattgaccaacggcaacgtttcgaagctcaggctgcggaacggactgctggtaacgacgaagctgaacatattgatgaagactttgtcgaggcgttggaatacgggatgccgcctactggtgggttaggtatcgggattgatcggttggttatgttaatgacggatgcggactcgattcgtgatgtcttacttttcccaacgatgcgtccagaagaagataaataattagatttaaaacggcagttagcttaggttttcctaagctaactgccgtttttgttgggtcagattgagtaactttagttcggaaagcgatttattgaaaaaaagttagattatttttacccgaacattgttgagacatttggaggctaaacttaagtaaaagcggattttatggtggtggtaggtaggatttgaagtcaattaacatgattatggttttaaataccgtatattatcaaagtggattgattaacatgatattattgactggttatttttgcattttagggcttgcaatttatcaggataattggtaaattagtatacgttgttgaggcgcacaaagcggttagccgcttgcttccaacgaaaattaattataaaaagttgttgacaagatgttgataacttgatatgatgattaagttgcgttgaggtaatcaacgaacgatttagacctttgaaaactgaacaaagtttcgacgaatcaaatgtgtagggtctcttgattttgaatcaagagcaaaacatttgcgaagttaaagggatcccagtcgctcgatagctgcatgcagctaattactgaaggcactggttttacttatacaattcatgatgatttcaatcattatgatttttctgaagatttcggtactggcttagcgtttgatttattcttaaacactttgatgtcagacttcaatttcgaatggactagtacaggcaaacacattgatatttataaacaagttggcaagcgtgatgctttcgtttggttagatggattgaatcttagctcgttgacagatgagagtgattacacgacgattgctacgcatattaaaggtacaggtaagttagacgacaaggaaaagccattggctactgctgagtacacgagtcctaacgcaacaacgtggggtgtaattgatgcagagccaatttctgatgagcggtttacaaacagtgattcattgctggcatatttgaaatcaaaattacaagatgtgccgttgattcagcgaactgcgacattgaatgatttcatgactaactcggtacctggaatgattaataacagtggggttgggaattatggctatattcgggatcgcaatggtgttgatgttgaaactcgaatcagtgaaaccgtgattgatttggttaacccagcgacgactagcgtgacatttggcaatatgaccaaaagctttacacaaatcaccgcgggattgcagactgctcatagtgattctggtaagcaaatcgcacagctaaaggccgggcttgatgctgtagacggcaatgatttgattactgatgcgagtacactagcaagacttaatgcattgggtggtgccgcgaatggataaaatgacggtgcaacaggctattaatattctttcaatgcagtttccaattagctgggagaagattgccaataaaccagagttagttactagtgatgacttggaccaacgactaagtttaattgggcagttgacgtcaccagatggaacggtatgggaacctgccattgataatgacgggaaagtgacgtggcaaaagaaggaggcggttgaatgagcattaaattattcgctaatgaattatctgctgtgtatgatgctccgctacgggaaatgctgatatctaactttacgataattcaagatgctttgaatgaaaacgactgggagacaattaagtcccaagttaatgatttagaaaaagaggtcaatcaattaattacccagccagaacagcttgaagcgtttaaaaacgagctatggggagaaatacgagcaattattttgcctgacttatcaccacttcaaattacacaagaagtgctgacgtttagaactgattcacaaggccaacaacaagcttccatgagcgaccggttgatggctgaaattaattatctgaaaggtagcactgagatatggcaacgacccatcacggttgacgatgcgggccaaattagcacggattacttggcgctctctactactgttaaaaatgctaaaaatattggcattatcggcgatagtgtcgcgcatggtcatcttgctgacgtcaactttggggatattttagtgaaggcttctggggccaagattaataacgtatcaagcagcggtgctcatatgatgaacaatgatgataacagtatttacgctcagagtaagcaaattgctggttgcgatttagtaatcattcaaggcactgatgatgattggttagcaaattccctcgtcggtactaagtcagacgatgaaaaaacttcttacattggtgccttttaccgcgtcgttgacaatattcgctcgcttaatcaacaagctaaaattattgtcatgacagcgacattgcaagtaccggttgatggtaccataattcgacggacagaccgcaccaaaaatgatctaggaaaagacttgcatgattacatggacgcacaaaagttagcttgcaccgatttggatttaccatatgccgacttcatgcaaccggaattattccagccgatgaacccagcctttcgaaaaaaaatgatgccagaaggcttacacccgaatagtgttggtcatcagcttattgcacaagagttagccaagcaactatattatttctatggataggagtgaactaaatggcaaaccaagatttagtgtatgacattactaaagtaccagataaccaagtgaccaagcaagccatctatgccagggttggcgatggcggcctcaaggctgttaccgtgaagctggtttctaatggtggaaattatgatctgactggaattaacgtcgtatttgaaggggtaaaagctgacgatactcatattattgataataatggtggaactgttttagacccacaaggcggcatctttaggtacgtattcccaccgcaagcttttacggttaagggggattacaaacaagccttcttcaaactcatgcgtggcgatcaagtagatacgaccgttgatgtagccattcatgttgattcaaacattgttgaaatgggaattaatagtaaagattatctcagcgattatgaagctttgattgcggacgttcaagccaagtacgatgctagtctcaaagatttactaacacaagaaaataattttgccacacaagtcaatggtgtccaaaccgctgtcaagaatgctcaaggcgcaattgataatttgaacgttcaaattaagtctggcaacattgtcaaaaccagcgatttagacactaaattagctccatttgacacggtaatttcttatgatccaaatcagagaaagctagtgtaggaaggaagttttagtaaatgacacaagaatatttcgatcaactcgtcgataaggatggcaatccaaccaatccttataccttaacgcaagcgattaaggacgcaactgataaattagtcatgactagcggtaaccaaatggcgattggcgggacgaagaacttcaccgatcaactaacggttaatgggcgtaatgtgctactaactggggacgctttcaaggatgcggtagccgtaccaaataatgatattcaagcgattaatgaaagtggtttatatcactaccacagcactgaaaataatttgccacatatggataatgaatatgctaatggatttattatagctgtgtttaccgatgacggtgattatggcattctgctgtttattggtagtctaacctatattgaaaagtatcagggccagtggcggactcctcattctgttatgcccgtaaaattgtgggaaggcgccgctaaacttggtgatacagttaatttaaaatcatctatcaatgaattcgatgatttacagttttttgtgaatacagtattaggtcaaacacgtctgagaacttcagcaataaatggtaaaacacgttatgttacacaagtcggccaaactcgtgatggcaaaaatacccgttcgcttgagcttacgatagaccagagtgatgatggcaacagtatgacgatttctcaagtattatttaatccgtcaccaggaaattcaactcaagttacagatgcagttttagatcgaatcgaaggaattagggggtaacgtgatgcaactattagtcgatcaacaacaacaaattacgagctatgcgtcttttggaagcttgacgggtggaatcgattatacgggccaaattccggccgagtttacggttgactttcagcctggacgatatttattaaagcagaatttgatcgtcattaatccagactacacggcgccaacagaagcaccggcaatgcccacaactgagcaacaattattgatgcaacaggagaaagacattatccaattgaaacaattagccatggatcaagaagcaaaaattgcaattttaagtaaagggagtgctaaataatgactgtttatgaagaatgccaattatttaagtcttggggtcaaaatgacgctagctactataaggtgtttgttggaatcggcttgacagccgatcaatacaaagaaatcactggtgaagattacgtggtatcaaccactgaataacgggagatgatggaatgacaaagacacttgaatttgcgtatgaaacaccgcaagaggttaaagtcggcgatgatgaaacaacgtttacgctggtatgtaaaaacgaagacctaccggttgacctgacaacggcgaagttaattactgtcaagattggtaatcgtagcggttatttacgtgggcagctaattagcaccgatagtttggcaaatttaccaactggacaactcaaatttaaccttgacaaggacacactggctaattttccaaccggtagttactgtttagaagtctgggtgacagacgctcaagggactagtatttatcctagtggcaacccactcaactttgtagtaacaacaaacatcgagaatagttcgggtgccacgattacgaccattacctttgacgattttgtgaaagcaatgaataaagccgcaagcacaattgccaagggtgataagggtgataaaggtgataagggcgataaaggtgacaaaggtgacactggtccaactgggccacaaggtcttaaaggcgacaaaggtgacaaaggtgacaccggggcttcgacttacgaagtagccgttaactccggttatagcggtacccaagaagcttggttaaatagtcttaaagtcgacttaaataatatgagcgtttgtggtcataattattttttgaacagtgaaactaataccataacaccaccaggtacagcaggttgggactggcgtattaatattagtgatgatttttggcaaaatcccgatcgtttaaaacaaaataatatcataatcaactttacttttgcggctcaaaaagcgctattagcagattttaattcgcggttttatttaaacacgtcaccttggccatcacagccatttagctatccagcggggaccacagctccgcaaaaatatgagctagtctttaacattacagaccaaacattaaatgatgtaagtgactgttttatccggtttcaagctaaggatacgcccgattttccgtttacgattacgcacgcaagcctacaaattggtagtgtagcttatgattggtgtcctaatccagcagaaattttgacacaatcagattacgcaaaaataaaagcggctattgtggcgctaggggggtctttgtcatgagttttgatttaagcgaatttttaacagaaggattaattagcagtgttaacaacgggttgattccatcggacttagcaactgtatacgctggcaattatttagtaaaatcactgattacccaagctcaggttactcaggtatctgatgcaattacagcctacaaggccgcacaggcagcagcggataagacagcagcggatcaagtgcaatgaggaggtagcttagttgaataagcataagttaaaggcactcatcttaacggtgggcgccatttttatggcctttttaatggtcaatgttaccagtcaggcttcaactagccgtgaccaaggggttgattggtctaaatataacggtaatagtgggacattcggctacagcactgataagttcgtattctcacaggcgggcggcttctatggtggtactaatatccctcagaccacttatgctagtcaagttaaatcggctaagcaggctggtaaacgggtgcacacctatttatgggacggtgttggtggcaatatgaccaatgccaaggcgatgatgtcctattacttaccacggattaggacgcccaagggtagtattgtagcgctagactatgaggatggggcttctaatagcgtgacagccaacactaatgtcattaaagctcaatttgagttaattaaggcgtacggctatacccctatgctgtactctggtaaagcttacctcaacgctcatgttaacgctagcgccattgcacgtgcctatggtaattgcctgtggctagctgagtatccggactatttggttagaactagccctaattacaactggttccctagcatggacggagtggctatcttccaattcactagtatgtataaagcaggtggattagatggcaatgtcgatttaacgggcattactaagtctggttatacgactgctagcaaggctaaagcacaggccaacattaatcaggctcataaacaggcagctaaaaaggccccatttaaggtcgttaaatatgaccagcgaggagtgttctatcctaatcggactctggccgtacgatatacggatagcgacaaagttagtcaagtggctacctattacaagggtgagagtgtgatttacaacgcggttattattgaacacgactatgtatgggcacgctacacccgttcaaacggcctgtatggctttatcaagctaggtgtcaccaatgggccagcttacgggaagcgagttactggtcagctggttagtcatacgtattacacagtcaagtttggcgacagctggtggtcaatcgctcagcacaacggcctaagtatgactacattagctagtcataatggcaagacaatttacaccactatctatcctggccagagattggtggtgcggtgattgcatacactattaggtttaggttgggatgaatggggatcgattgctgcaattgtcactagtatttgtgtattagctaattggattctcaataagacggtccgcattccacttaacaatttaggcaagcggcttagccgttttactgatgaaagtttaaaagtacgacagcaaaacgccgaaacaattaacgcaattgaaaatcgggtcattaaggtagaagaccggttagatggtcatgacattgaacttaaacatctatatgaaaaggaagccaaatcaaatgaaaaagattagttttaagaatgccgatggaagcttgaatggtaagttgattgctgggattatttcgttgctgatcgttttaattcaacaggtactagctgtatttggcatcaagtttgccggtgattggtcagccattgttgctgttatcaacactgtattaacgatccttggtatgctgggcgttattactgacgttcaaacggtgacggcaccaacgactgataacgatgaggaaagtcaggttgaagcgaccgctaatcaggccgctgacgaattacaagcacccacgtctacagtcgctgtagtgaatagttctgcatcatctgatactgaaacggcgtcagaatccgcctcacaagcggcaaaatagtgctataataactactggctataacttgatagagattttcatttgttgtggagcttgatcactctgcaacgtttcccctacgtttcggcgtgggggattttttgcataaaaaagccgcctgctgtaagggcagacggctaatacataagaagaagtatcttagcgaaagaggaaaccagatattactaggttccattattatcataggaatacataagaaatcgtgcaactttaatactcactactgtgaaactacattactggcaattagcgggtggcattctaaaaccagggcttctcacacgtattacacggtcgtttcaggtgactcatggtgggtgatcgctcaacacaacggtttaagcgtctacacgttggcagcgcaaaacggtgatagtatctattcaatgatccaccctggtaacaagttgcttatcaaataaaataacccgtatcggcttcggctggcacgggttatttttttgcaaaaaaatgctcacgcgggcaggcgtggacatagacagatagttctcgggtagtagaaaatcaataaaaaagagaaacttcggctgggcatggaatttgtgttaaaatgggagatctgagtattttaacccaacagcctcttttgcatgccctcctgtatattcttgaatgtttacacttctataatctcccggtatgtcccccttctgatctacaggaattgcatcaactgcatatgagtatttacttgtaggatcatatacgttgtcaatatacgttaccctttcaagtaagtaaaaatatttgccatcgtgtttaaatacatacccttttttttgtgtgttctctaaaatatatattgcattaccatcagtagggcctgcaccacccacgtcatcaacggtatacaatgtgatatttaattgatctctcttggctgcaaaattaattgcttgttcaggattggtataaccgggccatttaaacggtccaatactaaatatcatcattatccctacaattacaccaatgagactcatcaaagcccaaccatttttatctgattcccataataaccaagccgcaatagaaaatacaattaaaacaatccatccaaacatgagatgccctccaataaaaatatcaaaaccaattgtttttcctttttgtttaaattctataaactattatattataaatatgtacaaatagagatgcaaaatataaaatatttgggagccttccacgatttgtaaattaaaaatctctctttttcagaaatggcttataaatggcatttatagcgtgctacccttaatggtataactaccgtgcgggtgataagtcgacgtcggtagataaaaagagaagcgtcataatgctggtatatcagcattatgacgcttctcttttgctaattggtatcaaattaaaaccccaattttgcgttttggctgttgtgatcacaacagcactgttaagcgctcataaaaaagggttttgggatcgtgtcacaagtaagggtcctatgaattaattattactcgttaatagtgtctgaaaggccgttagcgacattccaggtacgacccgttgtcgagttgagattgtatgggttctgtgtgctggtggcgatgccaggtgccgttgatagggcatactgatagccagcctgtttatcggctttaatggtctgctgattagcacggccggctgggtaacaaataacttgtgtgttctgttgtaaattatgatcgagccattttttggaacttgataattccgtaagttgaacctggtaagttaaattatttaaatccagatggcgaacggtgtgactttgaaaatcaatattaccggatgcttgcatccgcttagcatcagctaaagttaagtggtttttcttatgggtaaagccggtaataaaattaatggtggcgtgttggtgcgtctgtttcaaaattggccaagctgctgtcatgttatctttatagctatcgtcgagtgtgatccagacaatcttcttttgtggaattcgccgatgtttgagcgcgtatacggcttcattggcagtcagcgttcggtagccgtgtgcctttagataagtcatttcagtttgaaattctttggcggggacacgtaactggttcccgctagaaatactgtgatacatcaaaataggcaagtgaacatctttgacggtatgccaatgttgataaggccgtgcttgtgcttggtgtttagccgagctgtgaacgcttttagcgctagtcttagatgattgactgctggcttttgtttagttgccggtgaagccgcctgacagcctgctaacaggccgagcgcgacgccgagacctaatacaaagttgataccccgcatgtgcatgataaatccccccatgatttaaaaactacttcctattctaatagaatagcatgtaaagcgcgataattattgaagtattgttaaaataatttccttaatgtttaaggaaactcgaatttgattagtaatcgtttaaactgattaagaaagcctagttagggtagccagaggaactttactccgatacgattaataaaataattaattcgggggatagtgtttatgaataaaaaatgggctgtttggttggtggcgattattatgatgattagtgtaggtacattgttaattgtaccgacgatgacgaagaatcaggggagtgagctggcaatggcggtggataacttaaacccatttgttaaggtacaaacggtctatggtcggactaatcaggcaatcggccactcgactggtcagatgggcgaagatatctatacctaccgaatgctgaccagcgatgcgcaaggtaagcaacgctggttgacatttaccgcagatcaccggctaaagcaacgacactatttaaagattgagacgaagggacaaaacgtgaattcatgggaggccgttgtgacaaatcaggtacctcaaaatatacaagaagtattggcttaaatttaggcatagtgccgtgtcagcgattagtgacgcagcactttttttgtgttattacgaaggcgagcttaataaattcttaaattcttttgagtgctaaactgcgatgagcgcgttacaatattttacgtgagacttgtaaagatggttgacaaaaggaccatttttagttagattaagatactgcattattatgtaataatgaatgaatgaaggggagcgtgcaaatgcttaaaatagcaaagggtcggatttcgtatcccgcggtaatcggtgcggtcttatttatgatcgtgcaagtgattgcgaccttaaatctgcctagtttgacatctaatattgtgaataacggggtggctactggtgacattagttatatctggaaaatcggatttgaaatgattggtttttcattgttatcagtcgtcgcagcgtttggcaacgtctttttggcggcgcggtcatcacaacaattagggaagaatttacggtcggatatttataaaaaggtcatcaatttttcaaatgatgaatttgataaagttgagacgtcttcactaatcactcgaacgaccaatgacgtcgtccagattcaaaacgtggccatgatggcgttacgaatgatgattatggcaccaatcatgctgattggtgcaagctttttagcgtataccaagagtcatgaattaacttggatcttcgtggtttctattccggtactattgatttttattggtttgatcatggcatttgcaataccgttgtttcgggcgatgcaaactaagactgaccgcatcaaccttgtttttcgtgaaggcttaacgggagtacgcgttattcgggcattccgtcaagataaatttgaacaggaccgttttgaagacgctaaccaagattacacgcacaatgcgattaaggttaatacgattgtggccttggcttacccggtaatgactttgattatgagtgggactaatgtggcaattgtctggtttggtggccaattgattagtagtcaaacaatgcaagttgggaatatgattgcgtttatgacttatgccatgcaagtattgatgagtttcatgatgcttgccatggtatttgcgttcattccacgggcggccgcttccgcttcccggattcaagaagtcttaagtattgaacctaaaattactgaccctgacaaggcagcaacgttaccagcgacgactgaacacagcttagaatttgatcatgtcaactatcgatatcaaagtgcggagcaattagcgctggcagatattgactttaaagcccattctggacagaccgttgccattattggtgggaccggttctgggaagaccacgctcgttaatttaatcccccgattctatgatattgagagtggggcggtcaaattagatgggaaagatgttcggcagttgaagttagctgatttacaccaagccgtttcgtttgttccgcaaactgctactttattcacggggacgattcgtgaaaatatgcaattcggtaacgaacacgcgaccgatgatgaaatctggcatgcgttagaaattgctcgttcaactgacttcgttaaagaagaaggcggcctggatgcacacgttgaacaaggtgggggtaacttctctggtggtcaacggcaacgattagcaattgctcgtgcacttgtcaaacaggcttccgcttatgtatttgatgattctttctccgcattggacttcaagactgatgctcaattacgggctgaattacgccaggataaacagattcaacagagtgtcgtagtcatcgtggcgcaacggattgcgacggtggcggatgctgatctgatcttggtcctagataacggtaagttagtcggcaaggggacccacgctgaattgaaagctaataatgaagtttatcaagaaattatgaagtcacaattacgagaggaggatcagctgtaatgagcgaaaagaatacgagttctactaagcctgcacgtcctgctggcggtcatggccccggtggtcatgctggactagttgaaaagcctaagagtttttggaaaacggcgattcgattgatgcgctacatgtcagaccggtgggtcggtttggcagtggtcatgatttttgccattgcttccgtgattttccagattcgaacacctaagattttaggtaaagcaacgaccgaactttataagggaattatgaagggggccgcgcaacagaaggctggtatcagtcaatccggttacccaatcaactttgaaaaaatcggtcagattattatgatcgttttgatcatgtacttggcctcagcactgttcaactttattcaacagtacattatgacgcggatttcccaacggaccgtgtataagttgcggcgttcatttaagggtaagatgcaaaaggtgccgatttcatattatgatacccattcgaatggggacattatgagtcgggccgtcaatgatatggataatattgccaacacgttgcagcaaaacctaacccaagcggtgacaagtaccgtcacctttgttggaaccttatggatgatgctgacgattagttggaagctgaccttggttgcactcgttaccattccactgagtgtcgtggtggttggtgtgattgcgccgaaatcacagaaattcttcggaacacagcaaaagagcttggggttgttgaataaccaagttgaagaaaactatgctggacacgtggtcatcaagagctttaacaaggaacaagatgccatcgatgattttgaaatccaaaacaataattattatcaatcagcctggaaagcgcaatttatttcaggtattatcatgccactgatgatgttcttaaataatattggctacgtctttgttgccatcattggtgggattgatgtggctaacgggaacgtttcgttaggtaacattcaagcgttcttacaatacacgcaacaattttcacaaccgatttcacaaatggcgaacttgttgaacacgattcaatcgaccgtggcttccgctgaacgggtctttgaagtgcttgatgaagaagaaatgaaacagacgaaatccaacttaccagccgaaccagatagtgataacttgattagtctgcaacacgttcaatttggttatgcggataacgacctgttaatgaaggattataatctggacgttaaacgtgggcaacaagtggccatcgttgggccaactggtgctggtaagacgaccatcattaatttgttggaacgtttttatgacatcaaaggtggttctattaaattgaaagggaccgatacacgggacctggatcgtgaagacttgcggtcacactttgcgatggtgcttcaagatacctggctctttactgggacgatttttgacaacttgaagtacggccgtgaagatgcgtcagatgaagagatttatgctgcggctaaagcggcccatgttgatagctttgttcgcaaattgccagatggttatcagacggttctgaacgaagaagcttcaaatatttcacagggacaacgccaattattgacgattgcccgggcgtttgtggctaatccagaaattctgattttggatgaagcaacgagttcggttgatacgcggactgaagtgcatattcagcatgccatggaacgactcctgaagaaccggaccagttttgtggttgcgcaccggttatcaacgattcagggtgcggacaacattattgtgatgaaccatgggtcagtggttgaaactgggacgcatgaacagttgatggctcaaaatgggttctatgcggatctatataacagtcaatttactggcaatattagtctcgactaaaggaggggtgtcaattgttccggaaaacagcaatggttgccgttactgcgggtgcgctaacgttcttattagcgggctgtggtaagacaaccttatcaacgactaaaaccacatacaagccgaacgggttagtagcggccgtcaaaggaaaatccaacgttaaaaaggttcattatcagcttgacggtggtcagacgaagacggcgacggtgcgtaatcatacgtttgttattcaagttccgaccaagacgacccgccaaacggtgaagattaaggccggttcggataccacgacggtgcacgtaaagggcgccaagaagctagttggctatcaaaagatggcgacgacttacaatcaggctttgattgcttctaaactcagcaagtctgatcaacaggcggctaagaagttgcaaactgagggtgcagcccttaaaaagcaacaagcaacgatccaagccaaagtcaagcaagcccaggcccaaatcaaggctggcggtacggcggctgccacgggtgctaagacactccaagcccaacaaactgctgcggcgcagctcaagaccaaagcagctagtttgcaaacgactcagaagcaggtcgaagcggcaatggcaacggcgaaaaagcaggtcaagtcgcaattgttaccgacgaagacgccaagtgatggcatcacgaacgtgttaacaactaaggattataagatccggctaaatgttcagaagggtgacgtattaggggcagcgatgattgttccaaccaaggcctttaagaacaagacccgccagaagaactttgggacggcgtttgctttgatgacgacaacaacgggcgccaatgccaagaaggttatgaaacagttccagaaggaaaccaaggataatagtggtagtacgacgacaatcgatccgattacctctaagggcgttcgcttcacgattggtgtctccacgtctgacttgtatatctttatgactaagtaatgttttatgagcgcgactggactttgattagtcaagtaaagctcactattcgaggttatgacgggacgaacccgtagttctaagtcggctgcattttacgcttgtaaagtaatcaaaaaatcaccacctggatgaacataatccaggtggtgattttttgattgatccattttaaatttgattccaaatagaccgtaaaggttacgtgcgttaaattactcaaatgataactctaagaagtataagtgtttggctggtaaatgggccgaagaaacccacacttcatggtagttagggacttttttctctgtgtaatcgaagaagaaatcaagtaagttgccgtttttagcgacaaagtcatcctgaaatcggttgactaatagcttgttgtcaggaaaataaatttcggggttagcgaccttaatatgatcggggacacccatccgaacgacattcgtgtattccggttgggtaaactgaatttcagtcgggtgatgggtgatatagaacatgacgttataaattgaatctgaattactagccacgacaaaccagtcctttgctaaatttacactcattataccaaaaaaatcttaaagcgttggaaatgtttgacgggcccttgacaaacttctaattaaccattaatcttttaattaaattcaaattaattaatttggaaaattacatataaaggaagtcgaagcatatggcagacgtacaattagactggaacaacttggggtttgaatatcggaatcttccgtaccgttatcgtgcgtattggaaagatggtgcttggtacaaaaaagaattaacgggagatgcaactttacatattagtgaaggctcaacagcattacactatggtcaacaagactttgaaggcttaaaagcttaccgcactaaagatggtagtgttcaattattccggccagatcgtaatgcagcccgaatgcagaccagctgtgaacggttattaatgccacaagtgccgacagacatgtttgtggacgctgttaaacaggttgttaaggctaatcaagattacgtgccaccgtatggaactggtgcgactttatacttacggccattgatgatcggggttgggggtaacattggtgttcatccagctcaggaatacatcttcacggtctttgcaatgccagttggtagttatttcaaaggcgggatgacgccaaccaactttacgacgtccgaatatgatcgtgcggcccataaaggaaccggggcttataaagttggtgggaattatgcggctagcttattcccaggtcaagaagctcatgccaacggtttctccgactgtgtttatcttgacccggttgaacatcgtaagattgaagaagtaggttcagcgaacttcttcgggattactaaggatggcacttttgtgacacccaagtcaccatcaattctaccttccgttacgaaatattcattactctacttggcagaacataaatttgggatgaagactgaacaaggcgacgtctacattgatgatttagaccggtttgctgaagctggggcttgtgggacagctgcggttatttcaccaatcggtggcttggaacatcaaggcaagttacacgtgttctacagtgaaacggaagttggtccggtaacgaaaaaattatatgatgaattaactggaattcaatttggcgatcgggaagcgcctgaaggttgggtccagaaagttgaattagactaagtacagtgttgtttgtgtgaataaaaagacggctttagtaagacccgtgatacgggtggaactaaagtcgtttttatgtgcgtgcgcatgatgcacgtggtattgtgaatagtaagaaatgctgtctaatcagtagacgcatgatcggaacgacagttattcggctaaggggacgttacggttaggttaagattgctgattgtgatgtaaagttgctgaagaaacgctaaaattaaagggagttgggcaagatgataaagtggagtaatcgacattggcaggcagttgaatgggtcagcacgggaattttggtgggctgtacgttactgtataatcatcaggttgtctcgaatcaatggcttctcgtcattggcggggccgctttaatcagttattggttggtcacattaccgcggttattcggaagtcagcactagcttcgggcaggtcgttgatgcaatcaggtcagttcgtatccgcagaaattgtcagggtaaaacgtggacactttgccaggttacttggttgatactgaccttgaaggcggtttagccacagtcaatcccaacttgaatcatgatcctaataagagagaatgaataaattaatgttaacttttagtagaaccgcagcactaattaaccaaatggtccaagatcaagtgatcccaggggcgagttatgccttgattgatggggctgagtggcacacgaatcaagtgggcgtcgctcaaataaaaccaacgatcaaaccattatggccggatgcgatgtatgatttagcctcggttactaaggtcgtgggaacaacaaccgtggcgatgcagttgatgcaaaatgggcaacttgaaattgaccgccccgtgcatgactacctaccggctttacagtccacaacgattacggttcgtaatttgatgacccatacaagtgggctgagtggttatattccaaatcggaatgcgttgtctgcagatgcgttattagccgcgattcaacagctaccaatcagtgagcgtaaccgcaatcatcgggtggtttatacggatttaggcttgatcatcatggggcaagtcattgaacgaattcttggagcggccattcagccaattatcactgagcgcgttttgcagccattagggttagcacacacgagtttccaacctcaactagcgcaaaccgttccgacgacgtattccatgaaaactgggttgttacgggggatcgttcatgatcctaaggccagagtcttaggtgaacactgtggttccgccggtttatttgccagtgtgacagaccttgttcggttttcacaattgatgctcggccaaatcgacgtaccagctgtgctatcacaggccacgattgcaagcttgtatcaagattggacgcccaatcaacacttacgccggagctttggttggaacctctggcaccgttctaatgagacgctgccggtgatttttcatactggttatactggcacgctcctgatgcttgaccgtcaacggcaacggggccttgttttcttatccaaccgggtgcatccagttgcaaataattcggtattccttccagcacgtcgccggttaattgcggcttggttggcggatacggttacaaattagctacttcggtttcacaaccgctttcatttatgctaaaatttagatattaaattcaacaatggagtgagtagatcttatgagtgagccatactttttaaagccggtgttccatgaaaaaatttggggcggtaccaaattacatgatgattttaattatgatattcccagtgatcatactggtgaatgttgggctatttcagctcatccgcatggtccagcgaccgttgaaaatgggccgtacgctggcatgacactggatcgagtatgggcagaacatcgtgatgtgttcggtgatgctaagggagatgtcttcccactattaacgaaaatcttggatgctagtgaagatttgtcggtgcaagtgcatcctgatgatgcgtacgcggctgaacacgagcacgaacttggcaagactgaatgctggtacgtgattgcggctgaaccgggtgcaacgatgatttatggtcatcatgcgaagacccgtgaacagctcgctgaatggatcaacaacggtgaatggaataagctattacggcgagtgcccgttaagcccggcgatttcctttatgtcccatctggaacgattcacgccgttggtaagggaattatggtgttagaaacgcagcagagttctgatacgacttaccggctatatgattgggaccgagtcgacaagaccactggtcagaagcgcgagctgcatttgcaacaatccattgatacaactaacgttccgcatcatgaccctgatcttgacatcacgactacccaggttggggatgcaacggtgaccaaatacgtccaatcaccattctttggtgtttggcaatggcggctaacaaatgggcaagcaacttttaaccggggaacagcaccttatacgttagtctctgtacttgatggtgaaggtagcattgtcgttgacggtcaagactatccattgagtaagggcgtccactttatcttgccatttgacgtaaaacaatggacattgaaaggcgatttacaaattattgcttcagaacctggggctaaggcataattagttaaccccttgatgggataaaaaagattgatactggttggaagccaatatcaatctttttttgcgcatctactgatagtatcagtttattaataatcactatctgaaagtatataaatatttattatagcttgaaggggtttactaatgagaaggcttccaaaaaactattatcattgtaaccaattaatacggatcaaactaaaaaaatcgtcactggctggtaactaagtcagtggcgattttgagtgatacgttttaaggtttcacgatgacgtttttagtgaggtcttcgttgagttgatccagtgcatcgaagttgccttcagggtatttacgttgtaaggccagtttcaagattcgtttggcgagggcttcattgcgtgcaaggattggaccatggaagtaagacccaaaggtgttcttgtagataacgccctcagattgatctttgccattattgccgttaccttggagcacttgaccaaggggccgttcaccttcgcccaggaaggtcatcccgttgtggttttcaaaaccatagtaggtctggtgggtttcggcgttctcaatggttatattaccaataaagcgattgttatcctgactgagcgtgtaatgatctaaggcaccgatacccgcgatcttttcaccatgggccccaacgtagtaatggcccagcatttgaaagccaccacagattgctaataatgggccaccggcttcgatatatgcggtcaaggcgtcttttttcgtttgtaaatccttggaaacaatcgtttgctcgtaatcctgaccaccgccgaagagggcgaagtcatatttttcttcgtcaaaccgatcatccaagctaactaagtcaacagtgatgtcggcatccactgctttagcatagtagcgcattgctaaaatgttaccgatatcaccatacgtgttcattagatcgccgtagaggtgtgcggcgtgtagtgtataagtcatggttaagccatccccccatcgataatgccttggctagcaagttgttttcgtaattgcaacatcgcggtgtaagttgcgacgacgtagacttgcttggtcggtagtttttgaattgcggtcgtcatgttggtcaggtcaggaataatggttaactgatcttccggtaccccagcaacttttagccggaacgtgatatcacgataacgttcacccccactaatataggcgggaatattcaatgccggtaatttttcaaaattaccatcccagatccaactagtatcaataccatctgcatagtttgcgttgagcagagcggcaaatgagaatggccggtcatcggtgctgattgtttgcaagacttggttaaggcccactggattcttgacgagaatcagcgtaacgtccttttcgccaacgtgaaaggtctcttggcgaccaaagacttgttcatcgttgtcgctaagggcgtgcgcgattttggccggcgtgacgtccatgaagcgcccaaccgcgtaggcagctagcgcattataaatattgtattgaccaccgatattaagatgcatggcctgaccgttgatttcaaagtctgagctagtcggtgtcatagcggttagggcgtttaatttgtatgtcaactgtggacgctcaaaaccgcagtggggacaataatacttgcccatattgctataagttcgactatggtaacgtaaaatatgctgacaacgcggacaaagcaggccatccgtatttgctggcgcttgttggtcatggtcgggctggtagtcaaatccgtaatacagtatcggattaggcaattgtttggcattgaagagtggcaaatcaccgttggcaataattgtcgcttcaggtgctaaagcaaccccgtctaagattttttgatatgtcgtgtagatttcaccatatcgatccatctggtcacggaaaatgttcgtgaagacaaaggcttttggtgtgatgtacttggtgaccatgattacgttagcttcgtcgacttctagaactgcgagtggcttttggtgcgctttaggtgcccgtaaaaaggtcgtgacgataccttgcttcatgttggatccgcttggattggttaaaatgtcagggtactgttcacgtaaaaccttgaccgtcaaggcggtcgttaacgttttaccgttggtcccagtgatgacgatgacgtcgtagtttttagcgagatgctttaaaatcgttggatcgagcttcagcgctaacttgccggggagtgagctcccaccgccacggaaggtgtgtaaaaaccaatatgcggatttacccgtccaggtggctaatgtactattaattgacataagttatcggtacccctaattcttgatttacctgggaaatgatcagtgtgaccaactaccgggtattaaaatcataattaccggacaaaatgtcctactctcaagtattttatactgaacgtccctaaaagaaaagtgatactcccgccatttaaccgcatattatcaattcgttaattagttttaatgacagaatgctgaaattcacggccaaatccgctataattgactagaaatgtgtaaaaaaggggaatgagtcgcttggcacagttattttttcgatatggcgcgatgaacagtggtaaaaccattgaaattttgaaagttgcccataactatgaggaacaagataagtcggtcattatcttaacgagtggcttagataatcgtgatggtgtgggctatgttgcgagtcgcattggccttaaacgtgaagcaacgccagtatttgatgataccaatatttttgagatcgttaaacaaacgaatccggatgctgcgtgcgttttaatcgacgaagcccaatttttgaaaaagcatcacgtcctagaattggctgacattgttgatgagctaaagattccagtgatgacgtttggtttaaagaatgattttcgtaacgaattgttcgaaggtagcaagtacctactgctatatgcggacaagatcgaagaaatgaagacgatctgctggttctgtcgtaaaaaagcaattatgaatttacggttccacgatggtcagcccgtttatgaaggcgaacaagttcaaatcgggggtaatgaggcgtactacccagtttgtcgtcatcattatttttacccgccgaaattaacaaagtgaggattaactgagaatggataagttttttgataagttacaagccgttgccgatcggtatgaggaactcggtgaactattaagtgatccggaagttatttcggattctcaacgtttcatgaagttatctaaggaaatgggtaatattcgtgaaacggttgaaaaatataatcactacaaggaagtcacgagtcagatcgaagaaaatgacgaattgcttcatgaaaagctcgacgatgagatgaacgcgatggtcaaagatgatttaaagaaccttaacgcggaaaaggatcaattggaacatgaaatcacgttattgatgttgcctaaagaccctaacgatgacaagaatatcatcatggaaattcacggtgctgctggtggtgacgaagctagtttgtttgctgcggacctgttcaacatgtactcgaagtacgcagaacgtcaaggctggcaagtagaagtggctgatcgtaatgaaactgaagttggtggctttaaagaaatcgttctgatcatttctggtgacaaggtctactctaagctgaagtatgagagtggcgcgcaccgggtacagcgggtgccagtgactgaatcagctgggcgggttcatacctcaactgcaacagtcggcgttatgccggaagcgcaggatgttgacattgatattgatcaaaaagatattcggaccgatgtctttcgttcatctggtgctggtggtcagcatatcaacaagacgtcttcagcggtgcggatgacccacttaccaaccggtatcgtggtctcgatgcaagaccaacgttcgcaacagcaaaaccgggccaaagcgatggaaatcttgcgggcacgggtctacgactactatcagtcacgggaacaaaacgaatatgatgctgaacgtaaatcagccgttgggacgggtgaccgttctgaacgtattcggacttacaattttccacaaaatcgggtgacggatcatcgaattgggttaacgctcaacaaacttgaccgggtgatgaacggcgagttagacgaagttattgatgccctcgttttagctgatcaagctgaaaaaatggagcgcttaactaatgaataagcccactcaacccacttattttgaagcccagcagtgggcttctttttgtctaaaaacggcccagttgccgactgatagtgctcgcttcctgttattgggcttgagtcggctagaccagacacaattactcattcgttaccgcgagccgctacccagtgctgtttggcatgcttatcagcaggggattgaccgggttgttgctggtgagccagtgcagtacgtactcggagacgcaccgttttatggactcacgttacaagttgatccagcagtgcttattcctagagtcgaaacagaagaattggtagactggattttgacggatgtcccagcgacagcgccagttcgactcttagacgttggtaccggctcgggcgccattgcattggcaatcaaacacgaacggccggcatgggagattacggccagcgacatttcaaccgctgcgctgcaagttgccaaagccaatgcggaccgcctacatttagatgttaagctggttcacagtgatctattgaccagcgtatctgcgcagccgtttgatattattgtcagtaatccgccatacatcgctgcgagcgaaaaagacgtcatggacgccagcgtcctcgcccacgagccacaaacggccttacttgctgaccacgatgggttggcactttacgagcagttagcgacgacggttgccgatcatctgacttcggccggtcgcttatacttggaattcggctaccatcagggaccggccttgcagacgcttttcgcgcagtcgatgcccgacgcgaccgtgacgctgcgacaagatatggcgggtcacgatcggatgctgcgagttgcaatgactctgactcggcaatagttgcgcgttatcctggagaatgctgataaaagcgggccgattaggtagattgctgtttgtaatccgcgtcccattccggccttcgggggtgggtgaacgcagtcgtcgatttgagctcgcgcataacccgcgttatctcaaatgtgagtcttatcctaagcgggctgtttttaacctgggaggtacggcgtgaatttatgagcaattgattaagtccgtgatgtaaataataaataatattatatgaaagtaacgatgaattaataataaagtagaggtttgaatatattatggaaacgaaagtatatacgccggcggagattccggccgctgcggcgttgttaactgcggggcagttagtggcattcccaacggagacggtctatgggctaggtgccgatgcgacaaatgtggatgctgttaagcaagtgtacttagctaaaggccgcccgagtgataatcctttgatcgtgcatgttgctgatgtggaaaccgttgagcggtttgctcaaccgttatcggaagcagccaagaagctgattaaggcgttttggccaggccccctgacgatgatttttaaattgaaaccagatgcgttggcaccagaagttactggtgggctgcagacggcggctttccgtaatcctgataatgaggcaaccctggctttgattcgtgcggccggaacgcctatcgtgggaccatccgctaatacatctggtaagccaagtccgacgacggcgcaacacgtattgcatgatctacgtggtaaaattgctggtattctggatgatggtccgacgaaggttggcgttgaatctacagttctggatctttcaaccgaccaaccagcaattctacggcccggtgccgtaacgcctgaagcaatcgaacgggtcattggcatgccagttcaaaccgaattgcaccatgtcggagctaaggaagttcctaaggcgccggggatgaaatataagcactatgcgccaaacgcacaagtttatatcgttgatcgttcggaagattggccagaagcgctggcgtgggcagcccagcaagatgtgccaatgggcgttatggcaacagatgatattttaactaacaatcaaattccgactaattgcgaacaattttcgcttggagaagatattcaatcggcaagtcgggagctgttcgcgggcttgcggcactttgatactgagacggaaattaaagatattctgtgccaagcctttgaaaataaaggacttgggcttgcctacatgaaccgattaaataaatctgccggtcagactcattttagtgtataatgattgcaagtcgggaaaacccgaaagttgtcacttgcgaaatggaggagatttattcatgaattaccaggaacaagatccagaagtatgggctgcgattagtaaggaacaggcacggcaacaacataatattgagttgattgcttctgagaacatcgtttcaaagggcgtccgggcagcgcaggggagtgtgctgaccaataaatactctgaaggctatccgggtcaccgcttttacggtggtaacgaatacattgaccaagtggaaaccttagccattgaacgggctaagaaattatttggtgcggaatatgctaatgtgcaaccacactctggttcccaagccaatgcggctgcatatatggcactgattcaacctggtgaccgggtgatggggatgtcactagatgctgggggacacttaacacatggatctagtgtgaacttctctggtaaactttacgattttcaaggttatgggctcgatcctgaaactgaagaattaaactacgatgcaattcttgcacaagcacaagattttcaaccaaagttaatcgttgcgggggcttctgcttatagtcgattgattgatttcaagaagtttcgcgagattgcggatcaagttggggccttattgatggttgatatggctcatattgccggcttagttgcggccggactacatcctaatccggtgccatatgctgatgtggttacgacaacgacacacaaaacgttacgggggccccgtggcggtatgattttagcgaaagaaaagtatggcaagaagatcaactcggccgtttttcctggcaatcagggtgggccgttggatcacgtaattgcgggtaaagcgattgctttgggcgaagacttacagcctgagtttaaggtttatgcccaacatatcattgataatgccaaggcaatggcgaaggtcttcaatgactctgacttggttcgggttatttctggtggcacggacaatcatttaatgacgattgatgtcactaagtctggtttgaacggtcgccaagtacaagatctgttagatacggtttatattacggtcaacaaagaagcgattccgaatgagacgttaggggctttcaagacctctggtattcggttgggaacacctgcgattacgacccgtggttttgacgaagctgatgcaactaaggtcgctgaattgattttgcaagcgttacaagcaccgacagatcaagcaaatctagatgacgttaaacagcaagcaatggctttaacagcgaagcacccgatcgatgttgattaagtaatttatatcaggtctggttttttctctctaaattagctacaatagaaagaaatcactaaggagtgtgcgtagcaacatgggtaagtttgaggttttggatcatccgctcattcaacataaattgacgatcattcgggaaaagaactgtggtactaaggtcttccgggaaatggttaacgaaatttcaacgttgatggcgtacgaagtatcacgcgatatgccgttgaaggacattgagattgaaacaccgattgccaagtcaacgcaaaaaacgttggcaggtaagaaagtcgccattgtaccaatcttacgggctggcttagggatggttgacggtttcttaaacatgattccggcagctaaagttgggcacgttgggatgtatcgggatgaaaagaccttgaagccggtcgaatatttcgttaaattaccaagtgatatttcacaacggcaattatttgtcgttgatccaatgttagccactggtggttcagccatcatggcgatggatatgttgaaaaagcgcggcgcaagtaatattaagtttatgtgtttagttgcggcgcctgagggtgttaaggcacttcgggacgcacatccagacatcgacgtttacacggcagcacttgatgaccatttaaatgaagatggctacatcgttcctggtttgggcgatgcgggcgaccggttatttggtacgaagtaagttgcattgacaaaaggtagcaccgccaggcaatgtctggggggctacctttttgttttccaaaattattaacaactctagctataatcatccgcattctgtgagttcattagtcatgaatcgtgactaaaacgtgctaatttctaagattaaaagcagccagctatggaccactggaaacgggtgtaagtgggcgtaaacatgctttgctggttcgtcctaagccgacttccagtcgtgacagtgttcgaatggctgacgaagatgtacctaacttttgatgaatttgtcgttgctttttacaaccagtaattttgtcaatcaaccggcagactgaaaatgatattgagatagctcactaatcctgaattggtgtagtaaaatttaatctcttgacaaagtgctaatgcacctaacgctttgtttaaagttccagtgtcaaaatagtcagcgacaaattgtaccaagttaagtggccgttcatcagccatttgagcggcttaccgaccggaggggctgggtgacaatgcccagtagccaaattattcttagctggaagtggtctgcttccggcttagaataagactcgtatttgagatgacacgggttatgcgttagctcaaatcgatgtcggctgcgttccagcaattgtcacccagccccggaggtcggaataggacccacaccggctgacgtacaacaatctaattagcacgttttaatcaccgttaatgccaaataataatttgtacaacgcgtatattataggtagttattgacattaactgttgggggacactggataattagggtgttttagatggcgattacgctgtattggtcgaatattcggtaacgttgggtgagaaagtcacattatttcaggaatgttgtcataaatattatgatgttttgaactaatatcgtttttaggggctgttactggttcggttcaaacattgagttgacaattatttcggagacgagtagactaattgcaattaaacagttcctttaaattagctcagagaggctgaaaaggatgaacggacgtgcgctttcaaggaagctgtgcgtaatttcggacagcctagccgctttgagtggtgggctgtcttttcttttgcaatcattcataaaaaggggtgcgttatgacaaagaaagcggcgtttcataatgatgaagtcgtgttagatattcatgaccgaccaaaattaggtagttggttaggcttgtcggtgcaacatctgttctcgatgtttggttccacggtattggtgccaatcctggtgggattaaatccaggtattgcgctgtttagctctggtgttgggacgctaatgtatatcctcatcacgcgcggaaagattccggcgtatatgggctcgagcttttcatttatcgttgtgatgcagtctctgatgaagaccgcaggatatccggccatcgctcaggggactgtcgcggtgggctgtgtgtacctgctagttagtttattagttactttaatcggttctgactggatcgataaggcgcttcccccgatcgtcgtggggccgattgtgatggtaattgggttgtcactcgcagggacggcagctaaggacgcaacgatgaacgggagtagttatgatattaaatatttcggcgtcgcgatggcgacgatgttactgaccgtcatttttaacatgtacttgcgtggatttatgagtttagtaccgatattgttgggaatcgtctgtgggtatatcattgccgtgttagttggaatcgttgacttttctggtgtggaaaaagcgcagtggtttgcgatgcccgcctttcaattgccttttattagttatcatcctggcatttattggggcgcgattctgagtatggcaccaatcgcctttgtgacgatgtcagaacatatgggccatattatggtactcaataagttgactaagcggaatttcttcaagaatccaggtttgaaccatacattggctggcgacgggacagcctcgattatcgccggctttgtcggtggaccacccgtgacctcctatggtgaaaatattggggtgctggcaattacgcgggtccacagtatttatgtgctcggtggggccgccttttttgccatcgtctttagttttgtgggtaagttatccgcgttgatcgagagtattccatcacccgtcatcggtggggtcagctttctactgtttggggtaattgcttcaagtgggatgcgaattctgattgataataaagttgattttaatcagaagcgaaatttaatgattgcatcagcgattttggtcattggaattggcaatgcctatttacaactgggaagctttcagttcagtggtctagcagttgcaacggtgctcggaattgtgatgaacttggtgctgccaaagacggcggtaaatgagaagtaggccgtcattgcgcgtgccaagaatgaaaataaagtcaaaataatgaaaatccaacgatttgaaagcttaatgagagcttgatattgttggatttttattgattgacgaaatgttgaaattattttgaattttttcgacggtggtggtattattacctttgtattttgattaggggtgtctctaatctaccatttcaggttacgataaaattgacgttgactagctcaaaggttaagtttatcgtagcaccgaaattaaaggaaagaggtgatattcagtgggtgatccagttcctacagtcaaattccttggactgacgtttaatatcgcgaatgacatctcagtaattgtgacttgtctgattgttttcttgtttgtttttttactttcgcgacatttaacaatgaagcccaagggtggacaaaatgtgctggagtggctcatcgagttcacgaatggcattgtcaaagggtcgatcaagggtaacgaagcgtctaacttcggtttgtacgcatttacattgtttctctttatcttcatcgctaaccaacttggattgttcattcacgttcaggtcgggcagtatacgtatctgaagagtccaaccgccgatccgattgtgactttgacgttatcgtttatgaccgttgcacttgcacatgctgcgggtgttcgtaagaaaggtatgggtggttatttgaaagaatacacacaaccttttgctgttttctcggttgttaacgtctttgaacaatttaccgatttcctaactttaggtcttcggctgttcgggaacatctttgctggtgaaatgttactaacgaaggttgctgatttggcaaagagcaacggttggttgagctatgtttactcatttccaattgaactcttatggcaaggtttctcagtgtttatcgggagcattcaagcgttcgtgttcgtaaccttgacttcagtttatatttctcagaaggttaacgacgaggaataatttctagttttttaattttaaggaggatacacagattatgggagcaattgctgcaggtattgctatgtgtggtgccgctataggtgctggtattggtaacggtttggttatttctaagatgcttgaagggatggcccgtcaaccagaattatctggtcaattacggactaacatgttcatcggtgttgggttggtcgaatcaatgcctatcatttccttcgttgttgctttgatggttatgaacaagtaatcattggtcaacgagttcattttaatgaaaatgaaagaaggaggtgtcattagatgctctcgcatttaattatcggtgcatccggtctctaccttggtgatatgttgtttatcgggattagctttattgttttgatggcattgatctctgttgttgcttggaagcccatcacaaaaatgatggctgatcgagccgacaagattgcgaacgacattgattcagcacaaaagtctcggcaagaagcgagtgacttagctgatcaacggcgtgatgcgctatcacactctcgcgctgaagcgagtgaaattgtcgctgacgcgaaaaagagtggcgaaaagcaacggtcaagtatcattgccgatgcgcaaaacgaagcaacgcagtataaacaaaatgcgcgtaaggatattgaacaggagcgtcaagatgccttgaagaacgtccaatcagacgtcgctgacatttcgattgcgattgctacgaagattattaagaagcaattggatccggaaggccaacaggcattaattaattcgtatattgaagggttgggaaagcatgagtcttgataatcttacaattgcaagtcgttattcaaaggcactctttgaacttgcagttgaaaaagatcagaccgaagcattcctggccgagttaaagcaattacggcaagtctttgtcgacaacccgcaattggcagaggtcctctcaggatcattgcttccggttgatcaaaaacagacaacgttgtcaactttgactgaccacgcttcagaatacattaaaaactttattcaaatgttgtatgattacggccgcatgtcgaacttagttggcattgttgacgcgtttgaagcacgtttcgatgagagtcgcaaaatagtgcatgccgaagtaacgtctgcggtcaagttgtcagatgagcaagctgatgcaatcgcaaaggcattcgccaagcgtgttggtgccaatcaggttgttttgtcacgtaaagtcgatgaagcaatcattggcggtgtaattgtgaagtcaaataatcaaacgtttgatggtagcgttgcgttacaactaacgaatttaagacgagcactcatcaacaattagtttacgaagaggtgaaacttttatgagcattaaatctgaagaaatcagtgctctaatcaaacaacaattagaaagttatcaaactgagctctcagttgctgaaaccggtactgtcacctacgttggtgatgggatcgcccgtgctcacggactcgacaacgccttacaaggtgaattactcgaattcagtaacggagtttacgggatggtacaaaacctcgaaagcaacgatgttggtatcgttgttttaggggattttgatggtattcgtgaaggcgatactgttaagcggactggccgcatcatggaagttccagtcggtgacgccatgattggccgggtcgttaacccattaggtcaaccagttgacggtttaggtgagattaagaccacgaatacgcggccaatcgaacataaagctcctggtattatgcaacggcaatcagttagcgaaccacttcaaactgggatcaaggccattgatgccttagttccaattggtcggggccaacgtgaattgattatcggtgaccgtaagactgggaagacgtccgttgccattgatgccattttgaaccaaaaggaccaagacatgatttgtgtctacgttgcaatcggtcaaaaggactcaactgtacgggcccaagttgaaacgttgaagaagttaggtgcgatggactacacaatcgttgtaactgccggacctgctgaaccagcgccattactgtacttagctccttatgctggggcagcgatgggtgaagaatttatgatgaacggcaagcacgttttgatcgtctatgatgacctttcaaagcaagcaacggcttaccgtgaactttccttgatcctccgtcgtcctccaggtcgtgaagcttatcctggggatgtcttctacttgcactcacggttactcgaacgggctgccaagttgagcgatgaattgggtggcggttcaatgacggccttaccaattatcgaaacgcaagctggggatatttcggcttatattccaactaacgttatttcaatcaccgatgggcaaatcttcttggatagtgattcattctattcaggtgtgcggccagcgattgatgccggggcctctgtttcccgggttggtggggatgcgcaaattaaagcgatgaagtccgttgccgggaccttgcgtcttgacttggcttcttatcgtgaattggaatccttctcacaattcggttctgacttggatgctgcaacccaagcgaaattaaatcgtgggcaacggatcgttgaagtcttaaaacaacctgttcattcaccattgaaggtcgaagaacaagtaatgattttatatgctttgaccaacggttatttggataaagtggcagttgatgatattgcccgttaccaaagtgaattgtttgaatttattcatgctagtcatcaggacctctttgatacgattttggcaaccaagaagttaccagaagctgataagatgaatggggccttagatgcgtttgcagaacaattccagccaaccgctgccgctgcgaagtagttatggctgaaaaggatggtgagtagtgcatggcagaatcattaatggatgtcaagcgccgaattgactcaacaaagaagactcatcaaattacgtcggcaatgcaaatggtctcaacttcaaaattgaaccagattcaaaagcataccagcacgtatcaggtgtacgcttctaaagttgaaagcatcgtttcacatcttgccaaagctcatctgatgtcagcaagtgccggtgttgctaacagtaattcgaacacgatttcagttagtgaattgctcgcgcaacgccccgttaaaaagactggtttattggtgatcacttcggaccgtggcctcgttggtagttacaacagtaacgtgttgaaacagactaacgatttcatgcggacgcacaaggttgatgccgataacgcagtcgttttggcggttggtggcactggtgcggatttctataaaaagaacgggttaaacgtggcttatgagtaccgcggcgtctctgatgtcccaacttttaaagaggttcgtgaaatcgttaagacagtcacatcaatgtaccacaacgaagtctttgatgaactttacgtcttctacaaccactttattaatcggctctcttctggttttcgggccgttaagatgttaccgatctccgaagagacctttgaacaaagtgagtcagataatcgtaaagccaaggatagccgggtagatgtcggtcccgagtatgaaatggaaccgtcagaagaagccattttgtcggccgtgttgccacaatatgctgaaagcttggtttatggtgcaatcttggatgccaagactgctgaacatgcttcgtcgtcaaccgcgatgaaggctgcatcagataacgctggcgatttaatcgataaattaaatctgaaatataaccgtgcgcgtcaagctgctattaccactgaaatcactgaaatcactggtggtttggttgcgcaagaataacgaagtgggaggaattaacgactaatgagtacaggtaaagttgtacaagttattggacccgttgttgacgttgaattctctctaaacgataagttacccgatattaataacgccttgatcattcagaaggacaacgatgacactttaacggtggaagtatcgttggaattaggtgatggggttgttcggaccgtcgcgatggatggtacggatggcttgcgccggggaatgacagttgaagacactggttcttcaattactgttcccgttggtaaagagacgttaggccgggtcttcaacgttttaggggaaaccattgatggtggtccagaattcggtccagacgcagaacgtaacccgattcatcgggatgcgcctaaatatgatgaattaacgaccagtactgaagtattggaaactggaattaaagttattgacctcttagcaccttatgttcgtggtggtaagattgggttgttcggtggtgccggtgttggtaaaactgttttaatccaggaattaattcataacattgcccaagaacataacgggatttccgtgtttaccggtgttggtgaacggacgcgtgaagggaatgacctttacttcgaaatgaaggcttccggcgttttgaagaataccgccatggtttatggtcaaatgaacgaaccacctggtgcccggatgcgggtggccttgaccggtttgacgattgcggaatacttccgtgatgttcaaggtcaagacgtgttgttattcatcgacaatatcttccggttcacgcaagctggttctgaagtttccgccttacttggtcggattccttcagccgttggttaccaaccaaccttagccactgaaatgggtcaattacaagaacggatcacttctaccaagaaggggtcagttacttcgattcaagccgtttatgtacctgccgatgattataccgacccggcacctgcaacgactttcgcccatttggatgcgacgaccaacttggaacgttctttgacggaacaagggatctacccagccgttgacccattagcttcttcttcaatcgctctggacccatcaatcgtgggcgaagaacattatcaagttgcaacggaagttcaacgggtcttgcaacgttatcgtgaattgcaagatattatctcgattttagggatggatgaattatctgacgaagaaaagacaactgttgcgcgtgcacggcggattcaattcttcttgtcacaaaacttcttcgttgccgaaaactttacgggccaacctggttcgtatgtgccaatcaacgataccatcaagggcttcaaagaaattcttgaaggtaaatatgatgacctaccagaagacgcattccgtcaagttggtaagatcgacgacgtggtcgaaaaagcgaaatcgatggtaactgattaggaggggtttacatggctgacaatgcaaaatcattaaccgttagcatcgtaactccagacggtcaggtctatgagaataagacgccaatgttgatcgtgcgaacgattgacggcgaactcggaattttgccgaaccatattcctgtgattgcatcgcttgcaatcgatgaggttcggatcaagcaacttgaaagtgatcaggaagatgacgaaattgccgttaatggtggttttgttgagttcagtaataatacggcaacgattgttgccgatagtgctgaacgtcagaatgacattgacgttgctcgagctgaaaatgcacggaaacgcgctgaaacacggattcaaaatgcccaacaaaagcacgatgatgctgagttggcgcgggcccaagtcgctttgcggcgtgccatgaaccgtttgaatgttgctcggcattaacaacttaaaattctgaaaagcatctgcaattatttgcgggtgctttttttgtgcggttcagttaagccgcgatgcacaagttagtcaaacttaccgcggtgagtcgtacccgttactgtccagttttaagcttgcacggttcaaagccgattggaaccgtgggttgatcaagggccaagcactggcttactaatggcgatatcgcgttgttaactagaagaatcggtctgattcgaatatttttcgccaatattgcatcagtatctggcagagcagtaattaagacgtggatcgcgacttaaatgggtgatcatcacgttccgacaattggcagcaattccaaaggtcggcataggaaacatgaacaactaagtttacagcgaacttaaacgtttcagcggccaattttgtcgcgacgttgaaatgttttgtccagtcggcgcggatgttcgtgaactaaattttactaatcgattgagcgtattaggggcattgcgataagtggaatggtagaatgcaacttatagtgagattacaataaagaaaacgattacaaacgaacgatactgctaatcaatatgggtatggcttgtcaaataattgcacgacggacttctaattagttaactaatcataagtatttaatatttgtgttgaaattgtaacgaaaatgtaaaatgtaatatttatccactagtgttctatggtatgatgattaggaaccgatttgaacctgcatgctgctattggcacgttgccatggtgtgtccaggttgttttgatggttgagctggtgtttggattgcacaccgcgcgttgccgatttgcttagtacagcggtgaacagtggaatttgggcaggtgcgaggcatctgatccaatcgggttcttttagtaagtgtgctttttacgcaatccgaaatctcacgtaacttgtttgttgattatcgtttagtgatggagggtttatccatggaggaaattgtagttcatggcggtcaacgtttgacaggaaatgtccatattgagggcgctaaaaatgccgtgttaccaatcttagccgcaagcttgttggctagttctggtcagacacatttatcaaatgtaccagtgttatcagacgtttttacaatgaacaacgtcttgaaatttttgaatactaaaattgattttgatgaaattaataaaacaattgatattgacgctagtcgtcaattatcatccgaagcaccatttcaatacgtatccaaaatgcgtgcttcaatcgtggtcatgggaccactattagcacgattaggccatgcgaaagtcgcgatgccaggtggctgtgcgattggttcacgaccaatcgatttacacttaaaggggctgaacgcgcttggtgctgaaatcgaacgccacgatggctatgttgaagcaaccgcgaaccagttacacggagcggccatttacttagattttccaagtgttggggcaacgcagaacataatgatggcggcaacacttgcagatggcatcacgacgatggaaaacgtcgctcgtgaacctgaaattgtggacctagcgaactatttgaatcagatgggtgctaaggttaccggggccggtactgaaacgatccgcattgaaggggttaaagcgatgcatggctgtgaccatagtatcgttcaggatcggattgaagctgggacattcatggtcgctgctgcggtgactcagggaaacgtcttggttgaggatgctattgccgaacataataagccattgatctcgaagatgcgtgagatgggcgtcacagtaacggaagaaccggctggtattcgggtcattggtccagaaatcttgaagccaacctccgttaagacgatgccccatccgggtttcccaacggatatgcaaccacaaatgacaattttgcagttgtgtgcgcagggcactagtttattaactgaaacggtttttgagaatcgcttcatgcatcttgatgagttacggcgaatgaacgccgacttcaaagttgaagggcgctccgtcattatgtatggtcccactgactttaacggggcccaggtcactgcgacggatcttcgggcagctgcagcgttagtaatcgctggactggtcagtcggggttacactgaagtgactaatttgaagtatcttgatcggggctactttaacttccatggtaagctggctaaattaggtgctgagattaaacgagttgatgttcccgatggcaccgtttatgcgttgaatcctgattttgcgaacgaagctgcggaataaatcgaaataaatgcttacaaaaccttcaaagtgcgataaactcgtttttgaaggcttttttgtggcgaagcggggtaacccggcgccaacattcaggaggacagcttatgtttattaatattatcgacaaacacatttcattgaaaccaactgaagtggctgacgcggagccgcttttcgacttagttgatcataatcgcgaccatttgaagttatggatgccgtgggttgatgcgacggcgaccgtgcaagacgagcgtcattttatcgaatcaatgttgaccaagcaggctcatggacaggtgtttatcaccaccatcattgtggatggcgaagtcgctgggatgctagacttgcataatattagtgccattaatcacaacggtgagattggctactggctgggccagaaatatactggtcgtggcgtcatgactaaagcgctcgaacgattagaagaaattgcttttacggagcttgatctgcacaaggtcatcttaggtgcagacgttgccaaccaggcaagtcgggctgttgctgagcgacgccaatatcatttggatgcgaccctgccagaaaatatcttgttaaatggtcaatatcgtgatgaagcaatttattcgctgacggtcgatgagtggtcgaaacgacaggatgattaggcacagccaattgattggtagtgacaaatgaacgagtggctaggacagccgtcagttctcatcaactgtagagtatggtataatgattagtcgtataattgtatgtttgagaggagcaaaaacatggctttagatattggtattgacttaggtactgccaatgttttaatttacgtatcgggtaagggcatcgtccttaacgaaccatccgtggtcgctatcgatacgaacacgaatcaagtgttggcagtcgggtccgaagcctaccaaatggttggaaagacgcctagtaacattcgggcaattcgaccattaaaagacggagtaatttcggattttgatgtcaccgaagaaatgctgtcctattttattaaaaaattaaatgtccgtggcattatgtcgcggccaagtatcatgatctgtaccccaacgaacactactgaaattgaacgcaaggcaatcttgcaagctgctgaaaaatctggcggtaacaaggtttacttggaagttgaaccaaaagtggcggctattggcgcagggatggatattttccaaccacgtgggaatatggtcattgacattggtggtgggactagtgatatcgctgtcctatcattaggtgacattgtggcaagtagttcgttacgaatggccggcgaccggatgaatcaggacatcgtgaactacgtcaaagatcaacatcacttgttgatcggtgaacgcagtgcagaacaagttaagattcaaatcgcacaagttttcaagcaggacggcgatgatgataaggtcacccaagttcgtggtcgagatactgtgacggggatgccgcgctcaattgacattgactccaatcaagttgaagaagctattcacgaaacgctgatgcagatcgttagcacggcccatcacgtgatggaaactttaccaccagaaattgcggccgatattattgaccgtggaattacgttgactggtggtggcgcactgttgagtggcctcgatcaattgatcagtgaaaacttaaaggtgcccgtaatggttgccgaacacccattgaacaacgttgctcagggggctggaattttacttgaacatatgcagaaaactgctaagaacaagaaataaattacgatgcgacggttattaatgaaaggcatccgcttttatcagcgggccttttctgcgtttagtccggctcattgtcgctattatccaacctgttctaattacacgttagaagcgatcgatcggtttggcgcagttaaaggcgttctaatgggagttgcacgtatcttacgttgtcagcccttagttaagggcggctttgatccggtaccagcccatttttcattgcgtcgtaatccgcaatacaaggaggaagaccaccgtggcaagaaaagataaggcgatttcggtcactttaaacgaaactaaggtcaacggtcaaccagttaccgaagttttgatcggtaaacaagtgattggacaagtgactcaagtcggtgaacgatttgaagctgaaatggttagtgacaaccaaccatttgcgcataccaaatcttttgatgagagtctgcaagagatcttgtcggcttaccatctacacaaaggctaatttttagtaaaccttcaacctggttccgagaattcggcaccaggttgttgtataataaaaactatcttaaagtacaaaatgatattgtgaatagggttagtctgacgcgtgcggtgggctaatcccaacaggttaggagcgttatttgtggcagaagaatctagactccgcagtcaagacgaggattcaagaattgactggggtatcatattttcagtgatgatgctaggattgatcgggctggcgtcgatttatgtcgccgcagtgcacgactctagttcagtaaacgtcacgaagcaggtgatttctcaagtcatgtggttcgtgattgggaccgcgattgccgtaattgtgatgcaatttgattcggaacagttatggcgagtggcaccgattgcctattggtttgggatcttcctgcttgcggccgttttggtcttgtacagtagatcactgtttgcgagcactggggctaaaagttggttcgcagttggttccttgacgttgcaaccgtctgaagtcatgaagcccgccttcatcttgatgcttggacgagtcgtgacaatgcataacacggagcacccaacacatacgatggcgagcgattggcaactcattgggaagttaattgcgtacatggtgccagttgctatccttttgaagttacagaatgactttgggacgatgctggtgttcttcgcgattcttgggggcgttatcttagtttctgggatttcgtggcgattattggcaccgacgtttgccattgtggcggcgattgcggggactgcgttatatctcgtgatctcgcagagtggtcgccatattttggaagctatcggttttaagcaataccaatttgcgcggatcgatacgtggttgaatccgtcgacggacacgtctaacaatgcttatcaagtttggcagagtatgaaagcgattggttcaggtcagattactgggcggggatttaacgtttcccacgtgactgttcctgtgcgtgaatctgatatgattttctcggtaattggtgaaaactttggctttatcggttgtgccgtggtcattttattgtatttcttattgatttaccagatgatccgagtgacgtttgatacgaagaacgaattctacgcttacatttcaaccggggtcattatgatgattctcttccacgtgttcgaaaatattgggatgagtatcggactgttaccaatgactgggattcccttgccgtttattagtcaagggggttcggcgttgattgccaatatggctgggataggtttaatgatgtcgatgcgatatcattacaagtcctacatgttcagtcgtaacgaccggtttgaatagtaaaattattgtaaaggtatggtgtttagtatgagtgaagatgcagcttatttttggacaaaagacgttgatggacatacgcggttaggtttaactaaggccgcccatgaggctcttggtgaagtgaaatatgctgagttaccagctatcggtgacaaggtcagtcagaacagcgcttttctgagcgttgaagcgaccaaagccgtttctgaattcaactgtccaatcaatgggaccgtggttgcggtcaacccggcgttgagtgagaacttcgatgcgttaaatagcgttgaagacggcgttgcttggttaatcgacgtggactaattgccaggccttgacaattagaaacaggctcggtatactcgttacattaacaattgattaaaaaagttatcattttgaaaagatgagtacgcggttatgattacttagagagtccctgattggtgaaaggggattaatcgtgaagctgaagatggtcttgaagtaatgaagtttagtgagcagtcgcaagctaagcttgggtcgcacccattatcatgcggagttcaaagtaactcttgagacaactggcgtgagctagttgtgaagatgggtggtaccacgaggctaagcttctcgtcctattgatgattattgtcgtaattgtctgggatgaggagctttttttgatgcgtaaggaggaattgacttgattgaatttaaagatgtgacgaaaacctttgatgctaagcaaggggcggttcacgccgttcaagatgttaatttaaaaatcgaagatggtcacatttatggcattgttggctattcgggtgctggtaaaagtactctggtacggatgctgaatggcttagagacacccactagtgggtcagttgtgattgatgatgtcaatattacaacgttgagcggggccaagttacgcgcccaacgtcaaaagatcggcatgatttttcaacattttaatctattatggtcgcggaccgttttggagaacattatgtttccacttgaaattgctggtctgtccaaggtggatgcccgtaagaaagccgaacacttagcaaacttggttgggttggccggtcgggaaacggcttatccgtcagaattatcaggtggtcagaagcaacgggtcgggattgcccgggcacttgcgaatgatcctcagattttactttctgatgaagccactagtgccctagacccgcagacaactgatgaagtgttggatctgttgttatcgatcaaccagaagctccatttgacgatcgtattgattacgcatgagatgcacgtgattcgcaagattgctgatcatgtcgcggtgatggaagctggtaaaatcgtcgaacaaggaccagtacttgaagtcttcaagcgaccacagcaggctgtgactaagcggtttgttaatgaagaggtcacgccgtcgctgaatgacacaacggtggtcgtggaccagctgctggcgaaatatccaaagggaaccatcgtacaactgacgttccatggcgatcaagcccagctaccgattgtttcagagatgttgaagaagtatccgttagatttaaatattattgagggtgggattcaccaaacccaagaaggggcgattggttcgctgtacttacaactaacgggtgatcaggaacagattaagggcgctctagcgtacctacaaacgatgcgggtggaaacggaggtcttgaaccgtgaatgatcaaggattagattcatattttaaatttgcaaatgtcgattggggtagcatgatgtcggccacgtgggaaacaatttggttgacgattgtgtcgatggtcgtagttgccattctcggaatcgccttaggtctgttactttatgagacggcggggagtcagaatccgctggctaaggccttgaattggattgttgcgctgttcgtcaacgttttccggtcgattcctttcattattttgatcgtgctattattgccggtaacgtctaagttagttggaacgattatcggaccgcgcgcggccttaccatcactgattatttctgctgcgccattctatgcgcggatggttgaattggccttccatgaattggatcatggagtgattgaggccgctgaatcaatgggggcgacccggtggcagattattcgaaaagtcctattgccagaaagcatgccggcattagtttctggaatcacggtcacgacgatttcattaattggctacaccgcgatggcaggagccattggtgctggtggtctgggtaatttggcctaccaagacgggtttcagtccaataacaacgccatcacattagtggcgacggtaatcattgtgattatcgtgtttatcttccaatttatcggggatattgcagttcggcatattgataaacgggttaattaaagttcgtataggaggaaacggaattatgaaaaaaaagggaattctaggattattagcagttgcggcaacggcaattttgttagtcggttgtgggaagtcatcgtcaacaaagacaacaaccattactgtaggggcttcttcagtgccacacgcacaaatcttgaagcacgtgcagccagaattgaaaaaggaaggcgttaacttgaagatcaaagtctttcaagattacgtcttacctaataaggcattggcttcgaaagaattagatgccaactacttccaacacatcccattcttggataactggaataaggaaaataatgggagcctcgtatcagcggggaaggttcacttggaaccaatcggtgtttattccaagaaagttaagagtctaaaagacttgaaagacggcgcaaccgttctggtcagcagcaacgtggctgactatggtcgggtcctgacgttatttaaggatgcgggtttaattactttgaaaaaagggacagatttaacttcagcaacttttaatgacattaagaccaacaaacgtcatttgaagtttaaacattcatacgaagctaagttaatgccaacattctacaaaaataacgagggtgacgcggtcgttattaacgcgaactacgcggttcaagctgggttgaatcctaagaaggatgcgattgcacttgaaaaatcagattcaccatatgccaacattgtggctgttcgtaagggtgataagaacaagccagctattaagaaactaatgaaagctttacgttctaagagcacccagaaatggattgaaaagaagtacaagggtgccatcctgccagtttcggccgactaaacggaccatcttaaatcagaatattgattgattgagctagcttcagggattccctgaggctagcttttttcacggagtttgactacggtaactttccgaagcgggttaatgaaaatgcacgtttgatattatctaagtagtactattgattaaattcttatgagacagcgtcctgcttgactttatagcggttgcaaggtacgctaaccaagttaaataaactacagattggggtttgcagcatgcgtaaatatggtgtgatcgggttaggccaagtcggtgcgacagtggcttatacgttggttcaacaaggaaccgttgatgaattagttttaatcgataagaatgaggccttggccaaggcgcaaaaactcgatttagacgacgcgtcacctcgtctaagctcaaccactaagattattttaaacgattattcagctttggccgatgccgaagtgttgatcgtggcttctggcaatattggtgccattgatatgaatagttccaagggtcgctttggtgagtatgatttaaaccaagcgattgtacgggagatcgcgcccaagattgtggcatctggcttcaagggtattttgatcgatattatgaatccgtgtgacgtcatgacggattatttacaacgaatgacaggttttccacggcaacgggtttttggtacggggaccttcttagatacggcgcggatgcaaaagtatgtcggacaagcagctggtacgaatggtaaaaatgttgcggggtacgtatatggcgaacacggcaactcacaatttgtagcttggtcaacggttagcgtcaatgggcagcctatcaaaaatttcccaggtctgaaccttgatcaacttgaagaagatgcaaggcaaggggcatttgcagtcatggcgggtaagcattatacaaactttgcgattgctacttgtggtgtccgattggcagaagctgtcagcgcggatgcacaactggcttgcccagtttcagcttttgatccgcaatatgggacatacgttggcatgcctgctgtgattggtaaaaacgggattgaatcattaattcaactagatctgaccactgatgaacgagcgtcgttagcagcgtcagcgaagtttatcaagtcgcaagtggacgttttaccgcaagcataagctttttctaagcatggattgaaacatcttgtcattaaacgtggcctaatcagggtgtgcggtgtggacttgggtattggctcaggttggcttcgtgacgtctataattaggtcacgttttatgattgaatggttcttttgggcagacaggcgctgacatgctaaaatagaaggtaaattcgagattacgaggtcattatgcaagcagagaaattgatgcaggttaaggatgcagtgttaaagttaagacaacaacttcgagcgggacaaatctatcagtcactgcccagtcgaatggcaacgctgattaagcagttaccgagtaccgtgacaaccacggtaacgattccgagcgacgaagaggtgcttccactgattgcaacacttcatgagcagttgaagaaaggcacgttgaccgcgatgagcgacgatcaaatcaaattattgatggcacacgttggttcgctgaatccgctggttcgtgatcaaggcgtctactatttgttaaacgaggcattacagcagcaggtactcacaccggaacagttgggcgatatttttgatcagttgattcaagatcagatgttatttgcacacatcgatgagccgcaaaatgatgccatttatcagcggtcatttgcgatactattactgtcagtgctcttgtatgcggaccatgcgggtctcaagtttatgacacccgcgcggctggatctagttgttgagcaaatgacagtctacattttactcgaaaaggatactcgggggtttgtgggcaccaccggttgggcgcatgcgtacacgcatattggtaatatcttagatgaactggcagatgagtctcaactcgcacgtgcggataaattattactgttggccgcattgattgctcgttatcaaaagttaacaacgccgttgatttttggcgagccagaacgactatcgacttatttgaccttgattacaaacaaacatgagctttattgtgattatttgttaactgcgatgaaggactggcatcagcagttgatgatgcatactcgtccggctagtgaagctgaatggacgcagattttcaatcgtaatcgattattggaagcacttgcattacacgatgatctgccaacggccgtcgtagattatttggatgatgaattagaatttttaggttagttttggaaggaagtcttttgaatgcaggcaaaagcagttggattaacgcaagggttgccagtgagcgatccgaatagtttacaagatgtcaccattaatgtaaatcaacctcgtggccgtgatatcttagtagccgtcttagcaaccgcagtcaatccaatcgatacgaagcagcggcaaggtcaatcgccagtgacaacgccgcgaatactaggctttgatgccgttgctaaagtgttggcggtcggtgaagcagtgacaacgattatgacagatgatgtcgtttattatgctggcgccgtcgatcggccggggagtgatgctcagtatcaattggttgatgaacggttagttgcgtgtgccccgaaaacgtggtcgccggcgcagtcagctggtctgccgctaacgacactgacagcttgggaagcattgtttgaaaaattaccattcactgcagtggctgacgcgaatcttggtcagagcgtccttatcatcaatggtgctggtggggttggctcgatggccatccagttggcaaagtgggcgggtcttcaagttattacgacgactggtaagccagaaaccactgaatgggttaagcggttaggtgctgatatcgtcttagattaccatcaagatctgggatcgcaattagctgcggccggtttgcaggctgtcgatcatgcgatactattacactctacggatcaatacttgccattagtgacaccgctagtccggccacttggcacgatcgtcgccgtagtgacaaatcagcaccccttgccaatggcgttactaaagccgaaaagtttgaattttgcttgggagtttatgtttacgaaggctaactatcagttgccatcgatggcgacgcaggggagtattctggcacaggtagcgcaactggccgatgccggggtgattgtaccgacgaccaagcggactttagctggaattaatgcagcaaatttgcgaactgcgcacacaatcgtagagacggggcaaatgttgggtaagattgtcttgactgcgccatttgacgcgtaaaaaacaacgttttattgtaaaaatgttttcaattgtgctcagatattgtagaattaactaagccgtagtatgaaataaaccttgataggatgaacaaaattatggagacacaaaaaaagatccatgttggtatgttgtttggtggtaactcttcagaacatgatgtttcgaagcgttcagcgcacaacatttatgatgccatggacaagaataagtacgagattgacttgtttttaatcacgaagaacgggattgtcttgagtgatgctgcaactcggcgcgtatttgatggtgaaccagaagatcaagtcgtcgccgaagaaatgccaaagttggacatgagtgatccattagctcccatcaagaacctgacactggccaaagatattgatatcttctatccagtggttcatggtaacttaggggaagatggtactttacaagggctgttcaagttattgaaaaagccgtatgttggtagtggtgtcttagcgtcggcagctagttttgataaggatattacgaagcagattttaacgcatcatcatattcaaaacaccaagtacgtggtggttacaccggaaaaccgggaccaaatgacgtacgcttatttacaagtccacgtgggtgatcatttattcattaagccagccaatcaaggatcgtcgattgggattcataaagctgagaatgaacaagaatacttggatggtttggccgatgcgttcaaatatgactacaagattttagttgaagaatcgattgacaatccgcgtgaagtggaatgctcgatcttaggcaatgaaaatcctaaggcatctaagcttggtgccattgatgtgccgaagacggacacgttctacgactataataataagttcgtggatgcgagtggtgtgacgttcgaattaccagtcgaattaccagctgatttgacgaaacggattcaacagatgtcgctagacgcgtttaaagcgcttggtctaaaaggaatggcacgcgttgatttcttagtgtctgaagatggtgaaccatacttgggtgaaatcaatacgttacctggttttactaacattagtttatatccaaagctatgggaagtttcgggcattagttatacggcgttgatcgatcaattgatccaacttggttttgatgaattcaaacgtcaatctgatattcactatgatttcgttgcgttagacgcggaataagatagtaatgagttttgtggtggttgggatgaagcgattcatcacggccgcctttttttgtgaggaggggtcaggttgttaagtcgcggatggcacttagtgatgcagggagcgcgccaactggctggaccgctagcctgctggtggttggccggcatattgctggcggtactcgctaaggtgctcgggattctggtcggtggggtagtcagcttgctaggcttgttgcttttgagtgcctggttaccagccatggtcgctcgtagtaatcatgagtcgtggcaggccggtcaatttttgtatcgctgggtgctgttaatgtttacggcggtgtggtggttaccactcggttggttaggctatttagcaactttacaagcgagcatacaattgccagcgactgttcaaaatataatctttaatacgcgttatgactggcttcctgtggcgggaccactttggctgttgggctggctgattagctggaagtggttaccagcactccaacgccaattgaccgctccgaccagctggcgtaattattggcgaacgggttggcggatttcctggtggacagtctttaaaaaaagtcgaaatgtgtggctgttcctgattagctggctcgttatggcaatcattggtggtggcatagtgtgggctagtggcgctgttagccagttggtcagtcaatttgttgcagttttcatgatgactgtgttgcaactgctggcttggttaatgtttatgggatggtggtcgcgcctttggccagaaacagcaatcgccggtcactctaactggcaaactgggctacttacgttgaccggtttgctagtcttgggtggttacgcaggctggtggctaggaacgccaccaacggcgccgctagcaattattgcacatcggggtgttaatggtcgtgacggtgtccaaaataccacagcggcgcttaaaaggactgtaaagcaagttcagcctgatatggtcgaaatggatatccagccgacagcggatcgccactgggtcgtcatgcatgatccaacgctgaaagctttagcgggtcaacccggtcccgttcatgagtaccccgttgataagttgagtggattaccactacgggagcatggtcaaaaaggctacttgagtacgtttaagcagtactttgcggtggcacacaaattacagcaacctttattagtcgaaatcaagtcagttgggacggctgatcaactaatggggatttttgccgacaactatgcacaacgactgatacaacaaaaaggggcggtacactctttggactatcgtgtgattgaacgattacatcaacgggcggcgcaactaccggttggcttcataacgccgttttatctgacggatttttctaattccgtcgcgggattttattctttacaagcactgaccgcgacccgtgagcagatcagtgcggcccaccgccaacatcggatcgtctacttctggactgttgatcggccgcttgcaatgcagcgactgacggccatgggggctgacgggctgatcacaaatcgaccgggccaactacgaagattacagggtcaatctaagcattattatttttatcaattgataaattggttagttagttggttataaactactgaaagaagtatgagaactaatcttaattattaagccacgtcaaccgattaattgagggtgtcatgacaattgatgtttgctgttaataaggttaattcgctcccctttaaatcgctttcagtagttctcacttttaatgaacaagtccttgattagggtggttaacgaactgtaagcctggataattaataaatgaccttcggccgatatcatggtataaacttaatattaaataagaattacgcgtatttcttgctaaaattccgttatgtgaatataattatatgcgtaattggtattgtccaattggttagtgctcaattattcgaacggattaacgaggattgattaggtgtcacgatacccttgttcatttagtgggggcagcaaggggagttacaaaatgagtttggtttaaggcaatcaatgaagaggggttaagcatgagaatattaggagaaaaagtgcggcagttcagaaagcggaagggcatgtcgcagaaggaactggctgatgggatttgtactcaggcaacgattagtctaatcgagaaaaaaagtaaaattccaagtatgaagattatgatgaaaatttgtaatcgattaggaattcgtttatcggaagtcattattgaaaatgacgaccagttatatcggaccttcaaaaaaattgatactttgattcgacatacacaactggaagaggctcaggatgtgttccagcatatccgtccgaagcagttacgtagtaatacggataagaaacagtattattactatgagggctatcttcaattagtgctcaatgacaatgctgacgaagccatctttaactttgggatgttgcttaatcagttcgtcaagtctagtcacgatatgtttgccatcctggccacacttggaaccggcttagcttatgaacgtaagcaggcctatgacaaggctgaaatttttgtcaaacaggcagttgctaccttacacacaatggatgcgcaagcaatgccgatgggtgacgacgattacttacaaaatgaaattttgatttacgcctcagccgcacaattgtatgctaagatcaattttccagaggaagctttggagttgatcgacttggcactcaagaaggctcaggagagtcagtcactttatttattagaccgtttgtatgcacaaaaggcggccaatgaagttgttttaaataatgtccagtcagcgcatgatcactattacgtggcgtatgcgttaagtctggtgacacataacagtagtttgaccgaaaaaatcacgaaagaaatggccgagtaccatattgcacccttgcaagtggctaacgacgcttagataacgtgataggacagttagcggtgaacggccgcgcttaatgggagatattgcggttcccattaggcacggcacaccgctgactgtcctatttttaataccggggggaatgtgaagatgagttgtcaaaactgtggttaccaaaattcaccgcatgccgtgacttgcctaaaatgtggtcatcgtctaacgccagtgaatggtgatgtcaatcagcaaagccgagtccagcggcggcgtcaacaatcacggcggacaactttttcgagtcgctttaggccacaaacactccttggggtattaattgcggggttactattgctgggtggcggctatatcgtgggacaactattgtggtcgtctacgacatcggcaactgccgagtcggcaggtaaaagccaggtgcataagccggctgccagcgattctgacgcaccgatgaaggcaacacagacatttccgactacgacagttactgatctggttgcgcaagcaacgaatgggttggctggtcaaacttcggtagcggtgatgccattaacgggtagccagaccgtggttttgaataatcgagcgcaacgtgctggcagtttgatcacgttatttattatggtcactgcctttgatcaggtccatcaaaataattggcgcatgcaggatcgttataccctgcgtgctgccgataaagttggtggaaccgggacgttgcacacattaccagctggaagccagttgacgtatgctgaaatcacgaaacgcatgattacggagagtgataatacggctgctaatatcatgttggatcgtgttggcggcttctcggcggtcaacacggaaattgcacagttgggtctgactgatacaaaaatggctcggcggttaatggatactgccgcactaaaggccgggcatgataacgatacttcggttcgggatgtggcaacggtgctgaaacgactggcgaacctgcgtttgatctcgaacaaagccgatcacgcgatgttaacgattttgaaggcgaacacggatcacagtaagttggtcaaaaatctgccaacacgcgcgacgatctataacaaaactggggactatcaagcatacggtgttcaaaatgatgcggccatcgttcagaatcgtcagggaacttttatcatgacgatgatgactgctagtggggaacgtaccgcgcaaacggtcgcgatgaatgatcttggtcaggcgctttaccgggcaattttagagcagtaagtggtatgattttggcaaatagtaaaaaatcggccagtgaggtaagtaacttcactgagccgatttttattgtacgtgtatcaaaagattactttttctttggtttaggagctggcttattttccaagtcagtccggacaacgagaacgtcacaaacagccatccgagtgacatattcggtgactgacccgatcaataagcgttcaaccgcgttgagaccagttgcgccaatcataattaaatcgatgcccatatccttaggaacgtcgcgcgcaataatcgtcttaggtgcgccatattcaatcgaataatccacgttatctaagccgtccgccttagcttctgcaacgtacttgtccaacgttttttgagcagtatcggtcacttgttcaaccatggtcgtatcaaaactagaaatgttttggaaagcacgggtatcaaccacgtggaccatgtgaactgaggcgttaggtccgttccgtttcgcgacggcaaccgcctttttaaatgctaattccgcttcataagaaccatcaacaggaactaaaatgtgttggtattgttgtaacatcattctcacccctcattactttataactatattgtaaaggttttcgcaaaaaataaaaagcgttttctatgagatttgcatgaaactcactaaaattagtgcaattgccatcataatcagtgaaccgctagccagtacaatggcaattagcattgtcgcttgaacaaagatggtcacgaaacaggcgatggtaactagtaacattaagccgccaccatagcgtgcgacgtgtttgattgtcggcgctttgttcgggtcaaaaaagagaaatggtcgggactggtgcgtcagcagataataactgagccaacccgcaatgagcgtgtatatgacaagcagtaatgtaatcaaaatgaacctccaacaggtgatgttaatcttattttagttgattccggaagagaagacaaatgcaatgctagctaaagataagcgattagtactagtagttcacacaacacaatttagcgtcaaatgattgcgacacacgtcatgctggttttatgaggatgagtaattgttcaggagtgccggattgttgcagaaatacccaaaccagcgtgatggactgtatttcagtagccgagattagtcatgtataaccggcttcccaattaaccattctccccatgagttttggacggtgttagtaaaatgacgttgtgaacttgggtcgctttcacgccacaaaaaaaggccaggaacaagtcctgaccaacggaagtaaacttccggaaaaactagtggtgccgttaatcgcccttcagtattgacccgctttaaggcaggtgggacgttctgactaattcgctaactaccaaaggataagacatgttatggaattagctaacggacatcccaaagtagtattaattgttcggcaacactttgtttagagcaatgcgcacaccttagtaatttcgactcttagtctagcatataaaaataaaagttgcaattattagcacaaccaaggtattgttagcgatttctctcgttagcctttaataatttttcgtattgttgcgcaagggctgtttcgtagcggccatttgttttgggctcgtaatacttggctgatttgatggcatctggtaaatactgttgagcgacccaatcacccgggtgatcgtgtggaaaatcgtatccaacaccatgaccgagtttggcagcgccttgataatgcgcatccttgatgtcggccgggatatcaccgaaatggccgtcacggaccgttgtgagcgcggcatcaatggcactgatccctgaatttgactttggcgataaggctaattcaatcacagcgtcagctagcggaatccgtgcttcaggaaatcccaattgatcggcagcttgaacagctgcgacggtgtgggcacacgcggctggattagctaatccaatatcctcataggcaatcaccatcagccgacgcataatactctttaaatcccccgcctcaactagccgggctaagtagtgtaatgcagcgtttacgtcggaaccgcgtatggacttttgaaaggccgagatcacgtcgtagtgggcgtcaccatctttatctgcggataaggctttcttttgcaagcattcttcaatcgtttgttgtgaaatggcgatggtgccgtcatcggccggagacgatgataatacggccaattctaacccattaagggcactgcgcaaatcaccgttggtagcggtgcacaggtggtgcatggccgcgggtgctaaatcaacgtggtaactgccaagaccgtttttttcgtcagcgagggctcgttccaccgcgtgctgaatatcatcgtcagtgagcgggaaaacttgaaagatctgcgttcgactacggatggctggattaatgctaatatatggattttcggtcgtagcaccaatcaaaatgatgcggccactttctaagtgaggcaataaaaagtcttgtttagttttatccaaccggtggatttcatccagcagaagaatgaccgtcccgctcattttggcttcttcggctacgatttgaagttgttttttactgtcggtagctgcattcagcatgcgaaaagcatacttggtggaaccggcaatggcactcgcgatactagtcttgccagtacctggtgggccgtatagaatcattgatgatagtcgtttggctttgaccatccgggcgatgatcttgcctgggccgaccaattgttgctggccgacaacgtctttcagcgtttttggtcgcatccggtaggctaatggttgttgcatcgtttgaaatccctccttgcaaaactagtcccaactattatagcatttacaatgaaggacaccgaataatcagtttaatgaacaaaataattataaaggattgatcattatggaattagatgccgttggtaaggcaattgtacagtatcacttagtcccactcgttcatcaggctaatttaggactagaggtcaccatgcaccgggtggacgaccatggtcacttagcgacgacagcacacccgcaagcgtttggatcagcgcaacaaaatcatcagttacgtccgggcttttccgcaagtgctttaaagtttactacgccggtacgtcgtgacattcctgcattgatagcgtatctgaagggcttgaataccgcagcacggcggtcactcgatgcggacgaacgactttggccactgtcgagtacgcctgtgttgccggatgatctaacgaacgtgccactggctgatgttgatcaagtcagctatcagcgtcgtcgcgacttagctcgtaagtatgagttacagcgattaatgacgactggtagtcacgtgaatatgagcttgaatgaagctttattcacccgtttatatactgagactttccatcagcagtatcacagttatgttgactttcgcaatgcaatttatctgaaagtcgctcagggattggtgcgcatgaactggctgattcagtatttatttggcgcttcaccacgcctagccgttacggatactacgagtcgtccacagcgcagtagtgttcaacatcccgatggtcgctacagtcaagtgacgggagactatacgtcaattgatcgctacgtggccaagttgacggcggctgttcgtcaacagcagttgttgtcggtcaatgattttgacgggccagttcggcttcggagtaatgggcagctagctatgatggcccggcagggggtctattatcttgaataccggggcttggatctcgatccaactagtccagtcggggtggacgcgaacgcggtggcatttgttcgtttgttggcgagttatttcgtaatgatgccggtacttccagctaagatggtatcccaagtcaacgctcaagctgaccaattgacccgtcaagttttgggtgaaaatccaacgacggctagtgctcaggccgtgccggctgttcaagttttagatgcacttgctgattttgttaaaacctatggcctaccaaatgaagatgccgtgttactcaaacagttgaagtcgcgggtcactgatccaaagaagacgctgagtgcgcagattgccatgcaagccgatccgttagcatgggcactcgaacgggctgcacgctatcaggaatcgagcaatgaacgtccgtttgaacttgcgggctttaccgcgctagatctatcgagccagcaactagcccagcaggccttgacgcggggagtgcaggtggacgttgttgacccacacgctaacattttacgattgactaagttaggacggtcgcaattagttgtgaatgggagcggaacggatttaaatccacaggcgctaacgaccgtactgacacataaagcagcggccaaacaaattctggctgagcacggggttccggtgccggcttcacagacatatcatacagctaatcagttgattgctgattatgatcggtacgttcaagctggtgggatcgtattaaaagcggcggatgagtcgcacaaagtaattgtctttcggattatgcccgaacgcggactgtttgaacaagtcgtccggcaactatttgagcaaacgtccgcggtaatggccgagaaagtggtagtcgcatcaagttatcgctttttggttatcgatggtcgtgtgcaagcaatcgtcgaacgaattccagccaatattgttggtgatggtcgctcaacagtcaagacgttacttgaccgcaaaaatggtcgagcgttgcgcgggaccgcttttaagtggcctcaatcagcgctacagttaggaacgatcgaacggtatcgcctggactcatatcacttgaccttagattctgtggtcagccggggaactcaaatcttattacgagaggatgcgacttttggtaacggggcggacgtgttagacgcgacggctgatatgcatcaatcctatgtgcaggcggtggaaaagctggtagcagacttacacttagcggtcgctggggtcgacgtgatgattcccaatctctatgccgaattagtgccagagcatcctgaaatggcggtatacttgggtattcatgcggcgccgtacttgtatccgcacttgttcccaatgtttggtactgcccaaccagtggcggggcagttgttggatgcattgtttaaaaatgaagattaaaaacaagaaagctggccttgtccagcttttttgatagctcataattaagtgtcatgattgaaaacacctatttcgaattttatctaaatatctcttgttgaattcctggttgcctgttatactctatttagatatatatctaaataggtgattggaggtagcccgtatggcgttgaatacgacctttaaagcaattgcagatcctgtcagacgccagattttggaagatttacgccagaatcggcaatcggctggtgagattgcggctcatttcaagttaagtaatgcaacggtgtcttatcatctcaagcttttgaagcaagctggtttagttaccgtgaccaaggaaaaaaattatgtgtactatgagctaaatgcgagcgtatttgaggaaatgttgacgtggctatatcgttttagtccaaagcagggggatgaaaagtgatgacaaaaaggaacttgcagttgtggctgagctatattgttattctgttaccaatgagctacggcgtcgtgaattatgcggccttgcccgccaaaatggctattcattttaatttggataatcaacctaatggaatggccgcaaaattattagtggtcgttggctttccaattatgatgatggcgtttcagctgatttgcgttggggtgacacggttgaatgccaatcataaggcaccggcgccacggtttgaacagatgatcatttggatcgtgcctgtactatcaagtgtgatctatgcgacaactatcagttataacttagaccatcaattggatatttggcgtattgccgttagtttgattgcctttattttcatggccatcgggaattatttgccaacaatcagtgtaaatcaatacgcgcagatgcaccgaggtggtcacacgattcggccaatgatttggcggcgtgttcgttattggttgggctatacgctagttggtggtgggatattgttactactgagtatcgtcacaacagcatgggtttcagtcagcctcatggggatcattgttgcggccttagttatcatgagtctttatggcactctagcgcgtaattaacgcagtcaaacgtaaaaaggtcctcatccgtgcgtggatggggacctttgttgtattaaagtaactttttgaatttatctagcaacccaggtgttttctcggcctggggtgttgctgatgaagcctgcgagggataacgctgcgcaacatcaataatatcttggttaatggcgcttgcagcagtgaatacaagcgcgtaatcatcatcagcagtgtggtagatgtcatccgttttgatagtgaatttgatattggcttgactagccgccttgatatacggcccaatcagttcctggtctaaattaccattaatatataattggtcatccggatggctcgtaaatgcttgatgaagtgcgtcgacgtaattggcctgtttaatttgggcaacggtcactgcgacttcgacgcgttcccgaaaggtccccaggtacttgcgttgttcgtcgggatgcaactttggcgtcccgtgcatggccgtttcgatgcggtcaactggttgtttatctgtttcagccattgtctaacatcctttccttgatagtaattatcattgtagcatgttcctccaataatagcgaagggaaggggggtagcgttgcgttagtgaatgcggtatggttaatctaaattagttttggggatgataaaacttgtttacaaatcaagattttgaaatttttaatgaccagacgttagcgggccgcatgcatttaatcaaaacggtgatcgatcctaagttcgaacaggtcgcaccaacgattatagcgagtttacaaacacctagcgagccaccgttctacgcgcacgttgccaaacatttacggcgatttaagaatccaccggtagacacttgggtcgcttttagtcaaaacaaacggagctacaaagcctggccacattttgaattggggctatggcctgaccgtttgtttatctattttgatattttggatgagtgtaaaccggccgtgcaggcaaagatgcaactcgcagatttaacaccacttttgaaggccttgccggcgggctatgttatcagtaataatcatggggtgccggccacgcaacttgcaacaccggccaatattacgcaggccatcaagaaattcgatcagtataaacacagcgagttggtcgtgggccgcgcagtcttggtcggtgatccgttatttgaagatgctgatacgttgaataaattgatcatcacaacattcaaacaattattgtcgatttatcaaccggtcatggcggctgtgagtgctgagcgtcaggtctgaaattaacagaacatacaaaaaaaccgccgcaaacgcgacggtttttaaataccggaaattaaagtttgttgtagtattcaacgattaatgattcgtcgatatctgcttcaagttcttcacgttctggtaaacgagttaatgagccttcaagcttatcagcatcgaattgaacgaagttagggcgtgcaacaacggcttcaacagcaccggtgataacagccaacttcttggacttttcacgaactgagacaacttggccgacactaacttcgtatgaagggatgtcaacacgcttgccatcaacagtgatgtgaccatggtttactaattgacgagcttggcgacgagttgttgctaagcctaaacggtaaaccatgttatccaaacgacgttcgagtaagatcatgaagttaacaccatgcttaccttcgcgaatcttaccagctttgatgaataagttagcgaattgacgttcagttaaaccgtacatcatccgtaacttttgcttttcacgtaattgtgtaccgtattcagaaagcttaccgcgacgaccttggccatgatcaccaggtgcgtaaggacgacgagctaactctttaccagtacctgaaagggacattcccaaacgacgggaaattttccaacttggacctgtataacgagacataaaatgtttcctccaataattttagttggagtaaaataatccgatgtaagttcgatattcgttcagattggactgcaggtttcaccattgcagccgcaggttactaactgaccaaaatattggcaccaatctgttgacgagcttacccactcactgctgcattattttacacaaagagtagcataacacgtttaatgctgattagtcaatgtgtgacgtcagaatcgccacaaattcggtcaattcagcttcgttatcagcattgaatcggtctaatgatggagagtcgacgtcgagtacgccgatttggtggccgtccttggtgattgggaccacgatctcagagttgctggcgctgtcacaagcgatgtggccggggaattgatggacatcggctacccgttggttcgtttgcgtttcaaaagcagttccgacgacaccagccccaactttgatgtgcatgcaagcgactttgccttggaagggacctaagtcgagctcgccagtttgttcgttaaataagtaaaagccggcccagttaaggttgtcataagtactgttgaggagggcactagcattagctaagttcgcgaccaggttagtttcttgaaacagtagggcgtcgagttgttggttcataagtgatgtttccgtggtagccatgtaaaaaatcctccttgaatgttaataaattgttactgtccgttagttacgtctatgttataatttaagatagattttaattggattttcagaaaaaagcaaggttacggttctcaacagggtgaggcgcaacgcaattaaaacggaataaataatgtaaggggtattcgtatgcaagtagcaatcggcattgttgtggttgcgattgtcatctacgcggcggtcaaaggctttcaattttatatcgacaagcaagtccgtcaattgacggaacggcaacaggcgctagtcaagcaatcgcagaccacagatttcgaaaaaattgaacaactcggactaacgggcggatcgttagcgaagttggaagcgttgcagagcgctggtcaagaagttgataatgatcagttacccgccgttagtgagcaattaacggccattacttcgcaggcgcggggcatcagatttctcgatgctcagcagaatctgaagaaggttgcggccacattagatacgattgaacaacgacaggcagaaattcgtcagggcttgcaggccttagatgacgcggatgccgcgcaccgccaagcagtggctagtttagagaagaagtaccaaaacatacggaagacgttattatcgcaaaacttttcatttggtccgagcatcgacaaattggaggatcagttagctaacttagaaagtgattttgatcatttttccgaattagccaaggctggcgatcatgacgcggctgaaaaggttttggatcagttacatcacgatactggcactcttgaaatggatattgatcggattccaccgatttataaggacctagtgagtgggtttcctgatcagttagccgaactggctagtggttatcaacaattaacggctcaacattttcactttgaggtcgaatcgattgatccagaaatcaaagcgttacagcaagcaatcgacgataatattgcgttacttggtgatttgaaagttacggatgctgaaaacggcaatcatgcgattgaaaagcggatcgaccacttatacgacgtgatgcaagcagagatcgatgctaaggccgttgttgatcaacaacaagaagaaatcagtaagttcttgacacatgccatgaatcagaatcaccgcttacaaattgagttggatcgattagcacaaagctatacgttgaataatggcgaagttgaacggacgcgtgaattgaacgaacaactgaagaatatcgaagctgtttatcaggcggacgtcacagctattactagtaagcaagctgtctttagtgagatcgcagctcattttgccgaacaagatgagcagttgaaaggcattgaagaagaacaagtggcaattaacaaaggtgtggcgagtttgaccgctgaagagtccaaagcccacgagacgctgcaacggttcgattttgaaatccacgcgatcaaacgccaggttgaaaatttgaacttgcctggactaccgaaagactatttggactatttcaaagtagttgccaaggaaatcgaacggcttgaccatgatattaataagcttgtgatcaatatggaagacatcacgaaacagttgattgttattcaggcggacatggcgaccttaaaggaaaagaccagtgatttaacggatgctgcggttatggcggaacagctcttacaatacgctaaccgttacaagacgaatcatgaagaggtgcaagaagccagcgtggaagcacaacggttgtttaccgagactcatgactacgcgcggagtttagaagtaattgcaacagctgtggataaagttgatccggggtcctataaacggattgaggacagttactatgcgaacaaacaagctgataagatgaacgatgaggcctgacgaggatagttgggaccgcccatatgcaaaattttagttaactgaaaataaccagctggtggtgattgttaaatgacaaccgccaccagctggtttttagttggcatcatgatgcaagtagtcgtgatggttctgagaagggtgactgggaacggccaacaaaaatggtgtttaggacgcaattgtcgtgtgattaatcagaaatttgaaacaaaaacccttgtttcactagtaatatttggtataattgcaaagaattcttatcgaaagtaagtgcaatgcacactttcttggaaagagaaggcgtagtaatgatttattttgacaatagtgcgacgacgcaagctgctcctgccgtactggagacgtatacaacggtttccaaaaaaatttggggtaatccgtctagtttgcataactttggtgaaacggcctttcatttgttggaacaatcacgtcaacaaattgccggcttactaggtgtgcaagcccacgaaattttcttcacgtctggtgggacggaaggcgataattgggttttgaagggtacagcgattgaaaagcgggcctttgggaagcatctaattaccacggcggtggaacatcctgccattcataattcgatggaacaattgaaggaacttggttatgaagtgacttacttaccggtcgatcaggaaggccgcatcaacgtggcggacttgaaagcggcaattcggcctgacacgattttagtgtcaacgatggcagtcaataatgaaatcggtacgattcagcctttacttggagtggcggaactactgaaacaatatccgaaaattcattttcatattgatgcagtccaaggaattggtaaaggaatccagaacatgatcatgaatgaccgggtggattttgtgaccttttcagggcacaagtttcatgcgactcgcggggttggctttatttacgcgcgcaatggtcgtaagttagcgccattaatgaatggcggcggtcaggaaagtaactggcgttctggaactgagaacttaccagcaattgccggcatggcgaaggccctgcgattgttgctcacggatgaagatggtaaggtagctcgtgagcgagctatcaaacagcgaatctacgagcacattaagtcgtttcctaaagtgacgattttcagtcagccaacgacggggttcgcaccccacatactgtgttttacgatcaacggtgtgcggggcgagaccattgttcacgcgtttgaagatcagggcatttatatctcaacaacgagtgcctgctcatcgaagaaacacttggcctccagtactttaatggcgatgcacgtgcaagaaaacattgcgacgagtgctgtgcgggtcagcctcgatgagaataatacgctggcagaagctgaccagtttattaaagtatttgatcaactttatcaaaaattctcaaaaattaatgcagacgcataacggaaaggaacttgttcatgcagtacactgaaatcatggtacgttatggtgaactatcgaccaagggtaaaaaccggcggaactttatcgatagcttaggccgtaacgtacgcaaagcgttgcacgactttccagaactaaaggtccacgcgaaccgtgaccggatgcacatcatgttaaatggtgaggatgccgataaagtcatgggccgtttgaagctagtttttggaattcaaaacttttcaccaagtattcgcgtcgatgccgacatggatgccgtctatgaaacggcgattgcgatggtcaaagcccagtttaaaccggggatgacttttaaaatttacacacggcgctccgatcatcagtttgaatacgatacaaatcaaatcaatgacatgctcggtgggcaaatcttggaccacgttgacgggattcaagttaagatgaagaatccggacattgtgttacgtgttgaagttcggttaaacggtatcttcttatcatcagaaacgattcagggtgccgggggattaccggtcggcaccgctggcaagggaatgctgatgctttctggtgggattgattcaccagttgccggctaccttggcatgaagcgtggtgtggacatggaaatggtccatttcttcagtccgccatacacgagtgaacaggcgttagcaaaggccaagcagttagcgtcaacgctagcaagttactctggtagcgtgaagtttattcagattccattcactgagattcaagaagaaatcaaagaaaaagtgcccgagggttatcttatgaccgttcaacggcgcctaatgatgcgtttgatggacgccattacgcgtcaacggcatggtaaggcgatttttaatggtgaatcattagggcaagtggcttcacaaacgatggatagcatgattgccatcaatgatgtgaccaccttgccggttttgcgcccagtgatttccatggacaagacggaaattattaagattgccgaagatattgatacctatgacttgtcgatcatgccatttgaagattgttgtacgatttttgcgccgccagcacccaagacgcatccgaagctagaccgttcacggtcctacgaagaacggattgatgttgaaggactgatggcacgcgctttggctggtgttaaaatgactgagatcaagccgggtgaaaattatttgaatacacaagaagacgtttttgctgaactattgtaggtcaaaaacgggtgatattattaccctaaaaacgagtacccggtaatactgggtactcgtttttttgattttttggatgatcaagcagggacgcgcggaagctcatttcgtaatggtaagtcagctaaataataggtcataatcagcgaaccaaggtcgtgactatgctacgataaatttagattgaatcagcgaggtgagtggatggagtggcaacaattattaatggaaaatacggcgttgatcaatgcacaggttgttcagattgggctggaacgggaaggccagcgggtaacggtgaccggtcatttggcggatacggcattatcaccaacacttatcagcgagttgtccggcctgcaacgggactttgcggagacacagttggagttagtcacccaaccgcaagcaagtgcggttgctgcgttgcacgccttaacgatgctcacacaacaagtccggcaaaggcttctgcctgaactgatttggccgctaagcatgccgcccacacttccacgagaagaccgggatattccaatcgctaagttggatgcggccgctgtcgcctatcgacaaggacttgctcaccgctatggccgacgacgtcaaatgttgtcaggtgttcactgtaatgtgagcttggcggctagtctgatgatgggattgtatcaggcccagacagatagtcgtgatttcaccacctttcaaaatcactgttacctgcacattgcgcagaattatttgcactatcgctggctactgacgtatctttatggctgctcaccatgctgctggccacagtctggtcttacgccaccagcccagcccgttcgaagcttacgcaacagttctagcgggtataccaatcggccgggtgttacggtctcgtacgcgtcgttaaatgattattgtcaaacactgcaagcggccgttgataatggaaaattaagtgcgaccaaggaattttacggtcaggttcggttgcgtcatgctggtggtcattcacaactatgtcaggatgggattcaatacttggaattacgtaacttagatctgaacccatgggccggtgcgggcatcgatctgtcccaactgacctgcttaacgtggttcgttttactgatgctctggttaccagtgccagctagtacggataattggattcaggcgggtcagcgcgccaacgaacaagttgccatcgaaacccccatgcaagtgactcgacagctaactgaaggcgaacaactagctgacgcgctacaaactatggctaccagtttacatcaaccacacgcgttgcaagtcgcccaacatatcttaactagtctgcacgacccggccaacacactcgctgcccgctgggaacaacaaacaaacgattcgctcgaacgtgcaacccaacttgcactccagctggctacgacaccacattttaatgcttgaatatactgaaatcggcgtacacacgtgttggcacgttaggacgcacatcggctgacgaacaacaaaccaactaataagcacgtttaaaccatgactaacgtcaaataacgcgtcgcatgtcaagaatgataatttttgagacgattatttgcgcggaaactgaaattgcgttaaatttgagctatactattactaccacaaatattagaaaaccattagttatcgaaggggtgttttacgtgcaagtattatttcatgatcaagcattagacttagtcggtgaaccgttacaagatggtgaccagttaccgaagttcaaagtgttcactacccatgatgaaaagattaagactaaggacttgctaggtaagcctgtcttgttaagtgtgatgccagatattgatacgcgagtttgttctattcaaacaaagaagttcaatcaacaggctgataagtacccccacgttcaatttttagccatttccaataacgcggttgctgaccaagctggttggtgcgctaaggaaggcgttaagaacttaacggtggcttccgatgaagaactatcctttggttacgccaccaatctatacttgcccaacaatgggacgttgacccgggcgatttatgtcgctgatgcggccggtaaaatcgtttatcatgaaatcgtgccagatgttagtcacgagccaaattacgttgcggcactggatgccctaaaacaattcgaataaggattgacggcactcaggaaattcattacaatagtgacaaccagcaatgagcaagagagtagcgataaacaacgtcaacagagagagcgtgaacagtgaaacacgcttggcggttttagcgtgaaggtagcttgcgagctgctattctgaactgttttagtaggaatagccggacgggatacaccgttcgttaacaacgatgtttaagctgtaaagcgatcacttgtgatggctttaaaattaggtggtaccgcgaagtccattcgtcctagtctaataggatgagtggacttttttagtgccaaaagaaaggatgtgccccaatgtcagaagaaccaactactgatatgccaactaagtatgatccgaccgccgtggaatcaggtcgttatcagacttggttagaccaagatttatttaagccttcgggcgacaagaaagctaaaccctattcaatcgtgattccaccgccaaatgtcacgggtaagttgcatttaggccacgcttgggataccacgttacaagatattattattcgtcagaaacgaatgcaaggttttgatactttatggttaccaggaatggatcatgccggcattgccacacaggcaaaggttgaggccaaactgcgcgaacaagggatcagccgttacgatcttggtcgtgagaagtttattcaacaagtttgggattggaaagacgaatacgcgtcgattatcaaacaacagtgggctaagatgggattgtcattggactattctcgtgaacggttcaccatggatgatggcctgtcagatgcggttaagaaagtcttcgttgatctttacaacaagggcttgatttatcgtggtgaatacatcatcaactgggatcctcaagcacggacggctttgtctgatatcgaagtgattcataaggatgacaagggtgcgttctaccacgtcaagtacccatttgctgacaaagactatactttcaatggtaaacattacattgaaattgccacgactcgtcctgaaaccatgatgggcgataccgccgttgcggttaatccgagtgatgaccgttacaaggaattggttggcaaaaaagtcatcttgccattagcagaacgtgaaattccaattatcgccgatgcgtacgttgaccctgagtttggaactggaatggtgaaaatcacgcctgctcatgacccgaatgactttaaagtcggcaaccggcatgatttgaaacggattaacaccatgaatgatgatgcttcaatgaacgccaatgcgggtaaatacgaaggtatggaccgttttgaagcacgtaaagcgatggtcaaggatcttgaagatcaagatttgatgattaaaatcgacccaattgtgcatagcgttgggcattctgaacggactgatgtccaagttgaagcgcggctctcaacccagtggtttgtaaagatgaagccacttgccgaacaagctttgaagaatcaagagggtgacgatgccgttgactttattcctaagcggtttgaagatgcctttaagcagtggatggaaaacatccatgattgggttatttcacgccagctctggtggggacatcggattccagcttggtataacaagacgaccggtgaaacgtatgtcggtgttgatggaccaaaagatccagaaaactgggaacaggatccagacgtgttggatacttggttctcaagtgcactttggccattttcaacaatgggctggccaaacactgatgcggaagactttaagcgctatttcccaacgaataccttagtgactggctatgatattttgccattctgggtttcaaggatgattttccaaagtcttgaatttacaggaaggcgaccattcaagaatgttcttttacatggcctgattcgtgatgaacatggtgttaaaatgagcaaatcactcggtaacgggattgatccaatggatgtgattgaaaagtacggggccgatgcattacggtggttcttatctaacgggtcgacggccggccaagatgtgcggttcagctatacaaagatggatgctgcatggaactttattaacaagatttggaacgccagccgttacgttatcatgaacctgggcaccatggacaaaccggaattaccagctgcaagtgactggacgttagcagataagtggattttgagtcgtttgaacgcgacggtcaaacaagtgacgactacctttgataagtttgactttggtgaagctggtcgagccttgtacaactttatctggaatgacttctgtgactggtatatcgaaatgagtaaggaagtcttgaccggtgatgacgctcaagccaaggccaatacccaaaacgtgttagcctatgtcttggatcaaatcttacggttattgcacccaatcatgccatttgtgaccgaaaagatttggttatcaatgccacacgttggtgaatccttagtagtcgctgcttatcctgttgaccatcctgaatttgatgacgaaacggcggaaagtgatatggcctcacttattgaattgattacggccgttcggagcattcgagcagaagctaatgcgaagatgtcatcagccgtggatctattaattaagacggacaacactcggttacaagctgttttcaaagctaatgaagattatattcaacggtttgcacatccgaagacactgtcaattggcgccgacgtggttgcaccgaagttagccatgacacaagtgattagtgatgcggaagtttacattccgttagctgaacttgttgacctcgatgaagaagtcaaaaaacttgaaaaagaacaagccaagtttgaaagcgaagccgcacgggcgacgaagaagttaggtaacgaacgctttgttgccaatgcccctgaagacgtcgttaatagtgaaaaagagaagttagcggacaatcagacaaaactagctgccttaaagcaacgtttagttgatattaaggctgaagcttaatttgcgataatagttaactgaaatgtgtgttactggtaaaatggtaatcgtcccgttttgggatggttaccattttattattaaaacgtaaaatataagggctcattagctagaagtatggtgagcaaacggccaaatgatgattcgcgcggtttacaggaaggaagaccaacatgattgacacttattcagcagcattagcctttattcacggccggactcagttcaaaaaagccccgacactcagtcgtatgcgccaattcttacatgaattgggtgatccacagttaaaggtggccggcattcacgtggcggggaccaatggcaaggggtcgacggttgcgaatttacgcgaattatttatggcagatgggctaacggtgggaactttcacgtcgccgttcattgttcgcttcaatgaacggatcagtgttgacggcacccccatcagcgatgaagaacttgttggtctggtgcaacagattcaaccgatcgttgccaagcttgacgcgacattggcaagtgggggccccacagaatttgagatcattaccgcaatgatgtttctttactttgctgctcagccaatcgatattgccattattgaagttgggttgggtgggttatacgattctaccaatgtttggacaccagccgttagtgtgattactacgatcggttatgatcatatgcaaattctaggtaatacattgacggcgattgcgactcaaaaagcaggtatcattaagacgcaggtgccggtaattgttggtaaattaccggctgaagcacagcaagtgatgattgataccgccatgagcaaacgggcgccgttgcggacgttgggagttgattttacaaccaaattattaccgccccaaggctggcaagaacggtttaactttgacgggttagaggcgcattttaaagacttgacaactccgctactgggagactatcaagttgataatgcggccgttgcaatagcggcgtacctaacttaccaccaagcgactcagctacccgtggtcactagcgacgtcaaagcggctgtgacagcaacacaatggcctggccgtttcgaacgcttgaatcaggacccactgatcatgattgacggtgcgcacaatgagccggcagtaactgaattagcagctactttgagtgagcgatttggacagcaaaccgtttatgtcatctttgcggtcttagcggataagcagcatcaacaaatgattcagaccttgggcgcattacctaatgttcaattacggttgacacaattcgaaggtccgaacgcaaaacgtccagcgaccgacccgacgatgttggcacatgaaatgccaaatggccggaccgctgaagtatttgataattggcaagctgccttgatgcagacactccaagaaatgtcgagtgatgatgcgttactactaacggggtcgctgtactttattagtgacgtacgggcttatttcaaggatggcagcgactcagaaactgattaggggctgacacggatgcttagaagacaattgcgcaagaaataatactgcgtccttggtactgatattatcaaagatgattgtgagttaactgaaaaaattgcgttaaaatgtcggtgaattaatggttagccggtcactttacgaaactactaggtagaaagggtggtttcaatgacgatgatcagcgaagaacaaataccgacagcacaagttcgtgaattaatgcaagcctactttgggacgtttttacccaacgacgcggtgactagcgcgatgcaggcctttgagcgtgagtacccgatagaggacgctatagagtggttacatgagtcgtctgaaaatccgcgctggcaaggtttaatcgtggcgctcagatgtgggcaactattaccccggccaagtcgattaattttggggcaggtatatggtagtgaacaactgggagccgttttagcacgggactttgccaacttagagcaggaacagttgcaattgttatgcttagatacgaaaaatcaagtgatcaaacgccaggtcgtctttcagggcacgctcaatagttgtccggctcaaccgcgggaaattattaaagttgccctaacgacaccgactgcccgggtcgttattgcacataatcatccgagtggtgatgtgacgccgtcaaaaaaagacgttgaatttaccaagcggttacaactggcttgtgaactgatggggttaccgctcttggatagctttattatcggtgtaaacgattactttagttttgccgagcagggcgtgttaaattgtaatacggattcgtaacagaatgtggtaaaataacggggttaggaccgataatttaatcggcctgatcgcgttttttttgttaaattttatctaagttaaatagtgggactgtatttttcattaatttacggtatgctaggattcaggcaatgcttttttaatgcagtgcgactatgctataatacttactattatgactaaataaaaaattaaatttgttaatgatgaagggatgaatgtagtgttcggatttgggacaaagaatatcgggatcgatctcggtacggccaacacaattgtgtacgttgacggcaagggcatcgtattacgtgaaccatccgtagttgcgaagaacacgaaaactggtgaaattgtatcagttggttcagaagcacgggatatgattgggagaaccccagcaagcattgtggcgattcggccaatgaaggatggcgttattgcggactacgatacgaccgttgcgatgatgaagtactttattcaaaagacactcggccgctcaaatggtaagccatacgtcatggtttgtgtaccaagtggggttaccgaagttgaaaagcgggccgttattgatgcaacacgggttgcaggtgcgcgggatgcatatgtcattgaagaaccatttgcagccgctattggtgcagggctgccagtcatggatccaactgggagcatggtcgttgatattggtggtgggactaccgatgttgcgacaatttccttaggtgggatcgtatcaagccgttcaattcgaatggctggcgataagatcgatgactcaatcatttaccatgttcgccagaagtttaatcttttaattggtgaacgcacagccgaacaactcaaaatcgactgtggctcagcatctttggaagccgctgaagacttggaagggtcaacgattcgtggacgagatcttttgtcgggcttaccaaagacggttgaaatctcatctgtagatgtttcagaagccatccaagaagtggtctctgaaattatttcagccattaaagaaacccttgaagaaacttccccagaaattgcctctgacgtaattgaccacgggattgttttgaccggtggtggtgccttattgaagaatctttccgaagtgattgcggacgaaaccaaagtaccggttttcatcgctaacgaaccgcttgactgtgttgcagttgggaccggtgaatcactcaagagcatcgacgttatgaaaaagcgataacaggtgagcgggaagacgtcttcccgcttatttattgttaaatcattgaattttcgaccgggggttcattatgcaaaagtttttttctaaccgaaaactagtgattgcgattgtcgtgttcattattagtttcggcttgatgagtgtctcagtagccattcgtgataagaaatcgacaccaccattgatccaacaatttggaaacgatgtggctggtgcggttgaccgggtgattgcttggccagtcaatggcttacaaagtgcgaccaactcagtttctgacttgttgaacacctatcaagaaaatcaaaaattgaagaagcaagttgatcaactggcgcaggccaaggttagtgcccagacgacgcgtgcggaaaacaagcagttacgcaagcagttgaaattaaataattcgttatctgattatacgacggtgaccgccaatgttttgacgcggacaccatcatcttggatgaaccaactcgtgatctctaagggtgcgacatccggtgtaaagaagaatatgcctgtcatgtcacaaaagggtttaattggccgggtcgtggaagttaaccaaacgaattctaaggttgaattaatttctaatacgagttcgtcttcgaataagtttgctattcagattacgaatagtgctggtaagactgttaacgggattatttcaggttatgataagagcaataatcttttagagatgggttccgtgacgtctaacgttaaaatcaaaaaaggcgataaagtcgtgacgagtggtttaggcggcaatacgccgaagggactttatgtcggcacggttgctagtgtcaagcaggatgattacgggctagcatccgaagtggaaatcacacccgcagcggaccttagtgacttaacagttgtgacggtcgctgaacagtagggaggtgcaacggtgcgttactcaagattaaaaatcatctttccaattgggttatttgttgcactctttttagacggctcggtgtcaaatgtttttgccggtaaactatttagttacccgtacgccagtgtcttacacctagttttactgtggattgtcttcgctgtctttttagacgaccgtgataatctgtcggttggaatctggtctgcattcgtgggcttggtgtttgactggtactatactgggattttaggcgtttacatgattggcttaccgttggtagtctatatatgtcgacaaatcaagccatggatcgacctgaactttttaacgttactgatgatctatattattaatttgaccattttggaagcatttacgtatatttggtacacgatgagccatgtgatctctagtgggttagcagactttgcggtgtacacgctaggaccgacgattgcggtcaacctagccatctttgtcatattatattatccaatgcgtcggttatatctgagtgttaattagtcggcagaaaggaattctaacatgcaacagagtgtagttttaaaggccagtaatgacggctatgaactgattttacggcaagaagcaagtttcgatgatattatggtcgacttgaaggtcttgttggatcggttgcaggctgataatacgactgataaacaaatctcgtttgacctggatacggctagtcgactactgactgcggaacaaaatcaaaaagtgacacagttgattcaacgatatccgttattcagtattcataagctaacggcagatgttattttgacggcggatgctttagcgatgattgaacgtgatacggtgcatctggttaatcagattattcgcaacggtcaggtcgttgagattacgggggacgtgttgttcttcggtaagatccatgaaggtggggtgctccgggcgacgggtagtatctttgtgatgggtgaggtaaacggtgcgcttgaggccggttatcccgatcacaatgatgcggtgatcgttagccccttagcgaccgtcccgcgggttcgagtcggtgaattgttagaattagtggaccttgaaaaagttgttgatgggacgaacgtcgtctatattaatgacattcaagcgttggactaccagccgctccagcaattaaaacgggtacgaccgaagctatttactcgaaatggaggacgtgtttgatgggaaaagcaattgtcatcacctctggtaagggtggggtcggcaaaacgaccactacggccaatttagggacggcccttgctttgatgggcaagaaagtttgcttagttgatttagatattggattgcggaatttagacgttattttgggtctcgataaccggatcctttatgatattgtggatgtagttgcaggtcgtgctcaaatacggcaggcgttggtcaaagacaagcggtttgatgacttattgtttttattgccagctgcacaaaatgcggacaaggatgcattgaatcctgaccaagttcgggcaatcgtagacgagttgaaaccagattttgattacgttttgctcgactgtcccgccggaattgaacaaggtttcatgaatgcgattgctggtgcggatgcggctattatcgtctcgacacccgagatttcagcaattcgtgatgcggatcgggtcgttggtttattggaacaatatccgttagccgaagcacctaagttagtgattaatcgaatccggacgcgcatgatgcaagatggtgagacgatggatattgatgaaattacgcatcacttatcgatcgacttgctaggaatcgttttcgatgacgatgccgtcattcggacttcaaataacggtgaaccgatcgttcttgatcctaagaatccagcctcacaaggctaccgcaacattgcccgccgaatcgaaggtgaaacggtgccattaatgaatttggatacacctaaaccgggtgtttggtcacgaatcgccggaatttttcatcgtggcaagtaaaaaaggcttgacggttgattaattttcgattagtatgaactcaacattaaaaaacagggaacagaagagtagttgtaaggaccttgccgagcgagttatcgatgatgggaagatgaccaaggattacaacgaaccacatctgtgagttggacagctgaagttagtaagctgtttcggttggcctcgttagcggcggagtttagtgataaactcgttgagattagttgtgtgagcaactagtgaatatgaggtggaaccgcgattaaatcgtcctcttaggcatgctggcctaaggacgatttttttattatcacaaaactccctgaggtaataactgtgaagttattacgaagtgaggtggcaccacggataaccgtcctcttgagtattcgactcaaggggacttttttgtgtacttgagtcgtgaccgattagtggacgcaggacaatgtgacctgtaaatttgggagggaaagtacatgcagtatattttagaaattttgccatcattattatccggtgccgttatgacactgaaaattttcatttggaccctgattgggtcgctaccattggggttagttgttggtctgggattaatgtctaacttcaagccgctgcaatggttattgcatttctacgtttggttaatgcgtggtaccccgttgttactgcaattaatctttgtcttttacggcttaccgttgattgggattgtttttccacggtactacgccgcgttattcgcatttattctgaactacgcggcctacttcgcggaaatcttccgtggtgggttacagtcgattgacaatggtcaatatgaaagtgcacgggtcttgcggctgagctactggcagacgattcgtaaaatcgttattccccaagtgatcaaaattgttttaccgtcagttggcaatgaagtcatcaacttggtcaaggattcatcgttagtttatgtcattggtctcggcgacttgttacgtgccggtaacgttgcgacagcgcgcgatgttactttggtacccttagtattagtcggaatcatttacttagcactgacagccgtaacgacttttgtgcttggacgaatcgaaaaacactacagttactggaaatagggaggccatcatatgttagaactaaaaaatattacaaaaagctttggttcacggacaattattaagaatttgaatttaaccgttaaggatggcgagattctaagtattgtgggcccttcaggtgctggtaaaacaacgttattacgctgtattacggggcttgaaaaggtgaatgccggtgagttcttagtcgacggccaaccatttgacccctatactaatcggagtaacgatagtgtgattggtgttgtattccaaaattttgaattgtttcccaatttaacagtcatgcagaatattactttagcaccgaccacggtcttaaagcagtctagcgcagaagcagaacagcaggcgcagactttattagatcgtttgaatctcggtgatcacgctgaccagtatcctttcgaattatcaggtggtcaaaagcaacgagtggcgattgcccgggcattagccatgaaaccgaatgtcttatgctatgatgaaccaacttcagcacttgacccgaacttacgacaggaagttgaaaagttgattttaggcttaaaggctgatggcatgactcaaattgtggtgacccatgatttaacctttgctgaaaatatcgcggatgaaatgttccacgttgaaccaaccaagaagcaatagggggcgtcagaatgaagaaaagattatttgcactcagtttgatcgttgtgatgctcctgggtatggcaacgacgttaagtggctgtggtcaaaatgtgactaaacgcgctgacacccaagatacttggtctaaaatcaagaaacgcggttacgttgtcgttggtttggacgacagttttgtcccgatgggctttcgcgaaaagtctgggaaactagttggttatgatatcgacctcgcccgggccgtctttaagttgtacggtattaagatcagctttcaaacgattgactggtccatgaatgcgaccgaattgcgcaatggcacaattgatttgatttggaacggctacacgaaaaatccccaacgtgaaaaagtggtggctttcagtaatacttatttgaagaacaagcaagtcctcgtttctttaaagaaaaatcatattaactcatttgacgatatgattggtaagacgttgggtgttcagtcaggttcttcgggctatgagtcattggaaaacaatccgaaactgctgaaggataagattgctaagaaaacgccagttcaatacgataccttcacgaatgccttcctcgacttgaatgctgggcgaattaaagggctcttgattgatagcgtctacgcgagctattatattaagcacgaagcgaactctgcggattaccaagaaacgcaaggcacctttaagtcggaagacttcgcagttgggatgcgtaagggtgacaaaacgatgaaacgcaaaattaatgccggcctaaagacgttgaaggctaacggaacgttagataagatcaacaagaaatggtttggtaatcaaaaagttgaaaactagcgtgacgtggcaggacttgtcattcagtgaccccagttatcggtgagcaactaatcataaataggctttccaagacggacgatgtcttggaaagcctatttatattggcacgcagacaaaatgggattgaaggcttaaacttatacacgaaaaattgttgaaaggtgccgctataaggccaaaaacaaccagctaaggcccgctggaaaaagttcgagttttgcataaacttgcttggctagcgtcgtcctaagccgacttccaggcatttcggccaattgctggaacgcggtggacacagatttaagccgaagaccacgtcttaaatactggtcttccactaaccaagcaaagaacgcttgctaagtggaatttcaccgctgagcattggccgaaatgccttccagtcgggacagtattcgaatggcggacgaagatgtacctaacttgtgatggacttgtcattactttttataaacgataactttgtcaagcaacggtcagacagaaaatgatattgttatggttcactatttctgaaccaatgtagcaataattgaacttctcgataaacatagagatttacacctgacgctttatttgaagctccggtattaaaagaccaattacaccaagttaagtggccgttaatcagccattcgagcggcttaacgaaacgcgcgcggtgacgctgaatcctgtgcttgctacgccaacggactgatgcccaaaccgcattaatccgttgactaggcaatgcttaaattcaacccgtgatccctcgcacactttagtctggaggggttgggtgacaatgctcagtagccaaattattcttagctgaaagtgggttgctttcggcttagaataagactcgtatttgagatgatgcgggttgggcattagctcaaatcgacgtcggctgcgttccagcaattgtcacccagccccggaggtcggaataggacacgtacatgctgacgaacgagtatccggggtcaattgccggcacctttcaacaacaattgatgaaaaacacggccataaaaaatgcccgactagttgactagtcggacgtatgggttaatcgaaaaattctttatataacgcaataacggcttgatcggcatcattgtcgtgtacaccgaacataatagaaatttcggaggcgccttgattgaccatgattaatttaatattgtcgttggctaatgcggtggcggcacgtgacatgatgccgacgcggttgcgcatgttttcgccaacgagcattaagattgagtagtcgtgcgtaaagtaaatttcatcgggattgatggccgctgagatttctgcaactaacgttttctctaattcgggcgtcaactgatgttcatcaaagatgatggtcaaatcatcgatcccagatggcatgtgttcataactaatatgatgattttctaaaatcgttagaattttacggcccagcccaacttctttgttgagcagatacttacgtaagtatagtgaacaaaaactagaagaactggcaatcccagtcaccgggtagtggggattgggttcgcgagttgactgaatcaaagttcccggggcctcgggatggttcgtattcttgacgttgacggtaatgttgccttcgattgctggaatcaacgcttcgtcgtgaaagacagaaaagccagcgtaagaaagttcgcgcatctcagtaaacgtcatttcactaatggccgctggttttgcgaccaaactaggattgaccgcgtaaattgcatcgacatcggtaaagttttcataacgttcagcatggacaccccgagcgatgattgcgccagtaatgtcggagccaccgcgtgaaaaggtacaaatttggccgttacgattgtaggcgaaaaatccggggataactaggatttgttcgctgttggcccacttagcgagctggtcataactactcttgataatctgagcatcatcaggaacgtccgtaacgaccattcccgcatctttagggtcaaggtagcgagcgttgaggccgctttgttgaaaaacagcggcgaccagttgcgcattgagacgttcgccgtgcgctttgaaagctgccatcaagtaggtgttgtcggcgtatgattgttttggtaagttgcgaattgtttcaaaaatcggagtcaattgtgcttcgggaacgttaaacccgtgaccgatttctgcataacggtcaatgatagctgcggtaacggcttgcgtatcttgatgatggatcgtttgacgggcatattgaataagtaaatcagtgactttggtgtcgccatcgaaccgtttaccaggtgccgatacaatcacatatttacgtttttgatcagcctcaacgatcgcgaggactttttgcagttgctgactactagcaagggaactgccaccaaatttaattactttcacattaaccgctccttaattttatcaataatgaaaagaatagcagacaaatcgcgacttggcaatgttaattgccactcacgagaatttaatttaatcgtgaaaataatcattttggcgaccataatctgaaaataaaaaaaacaataggacggaaagttgcgtcaatccggcctttcgcttattatttattacatatgcaaggaggaaacatgttgcaaactcagttagcaaaaggggtccaattgacgacggttcagagtcatcaatttaaaaccaaccagattattatcaattttcgggcaccgcttgcacgtgaaacaattactcagcggtcgctactatcgaatttattagaaacaagttctcgtgattatccagatcagcgagcgttagccaacgcattggctgccatgtatggtgctgcgtttggtgcgggtgttagtcgtaagggaccaacgcataacttgcaattagccatcaccgttgcgaatgaacggtatttggcaacggatcagccactgacaaatcaggccatccagtttttacaacaagtcgttttacagccgctagtggcggacggtcagtttgatcaagcgacgtttgaccgccaaaaaaagaatttggaagcggcgattatgtcggtcgctgatgataagcaatattatgctgcacagcagttaaatacggcgttgtttgcggacgaacctgcgcaacaagtgccaagttacggtacggcgagtgatttggcagccctcactgcggaaggtttgtacgactattatcaaatgatgatccaaaatgatcaaatcgatattatcgtgacgggtgacgttgatgaggcggccgttttagctcagtggcaacaagctggttttgaggatcgactgacggggcgcccacggccattttatcaacatcataatacaaaccagtacgtcgaagtgagtgaacaacaggcactcagccaagcaaagctaaatttaggttatgatttgccagtcttttatcgtggcaatcattattacgcggccttggttttcaacgaactatttggtgggtcaccgctgtctaaattgtttatgaatgtacgtgaaaaggcgagtctggcttactatgccagcagctcattggatactttccgtggggtgcttaaggtgcaagctgggattgatggcaaaaatcatgaccaagtgttagcaattattgcggcccaattaacggcgattcaagccggtgattttacggatgatttagttgaacagctgaagctgggcttgatcaacgattttgagtccagtttggatagtcaacggacattcgctgtgcaagccttgatcgatgatttaacgcaacaacgcgttacggatactgaatggctatggcagattcaaagtgtgacgcgtgaacagatcattgcagtcgcgaagatggtgacccttaataatgggttcttcttgagtggggtaaccgcatgaaagtaaaaaaatatgatcaatttaatgaaagttgttatcaagctcagttggataatgggctgacggtgacgttgttacccaaggccggttatcacaaaacgtacgcaacgtttacaacgaactatggctcgatcgacaatacctttgttccagccggaagtactgaaatgcaacgcttcccagatggaattgcccactttctggaacataaaatgtttgagaaggctaaccatgatgcgtttcaaatttttggtcagtacggggcgagcgcgaacgccttcactagcttcacgaagacgagctatttgttctcagctacccggcacctgcaggacaacctcatgaccctcttagattttgttcaagatccgtattttacgccagcgacagttgacaaggagaagggcattattgggcaagagattgagatgtacgatgatgatccaagttggcgcctgtatttcggaatgattggtaatctatatccgaaccacccactacaatatgatattgcggggacgactgagtcgattgctaagataacggctgatgacttgtacgccgcttatcggacgttctatcatcctgagaacatgacgttatttgtggttggtaattttgatccagacgaagtgttagggtggattacgactaatcaagcaactaaaaaatttgctgcctttcaaccgattggacgtaagattcctgaaaccgcaacggatggacatgacattattccttatcggacgattgatatgccagtcaatcgggccaaatcaatcgttggtgtcaaaggcttgctgccgattgaagcgggggctgctgctttgaagtaccgtgcagcggttaacgttttattagaattattgtttggcgatacgtcagcagattatttgcgattatatgatcagggtatcatcgatgatacgtttggttatgatttcgaattacagtctggatttaattttgtcacttttagtggtgaaacggatgatccagcccagtttgatgcagccatcattgatgtgctagaaaactggcggacggctgtagttggtcaggaagcagcactcgcattagtcaagaaggaaatgattgggcgggtcgtcttcatggcgaactccttggaggcaatcgcgaaccggtatgatcaacggctattcgggacggcgacaatctttgatgaaccgggtataattgatcagttgacccttgcagacttgcagacggttgctgaacaattattgacttctcaggcaatcagtgaataccagattcgaccacaagcaaagagttaaggaaatctgaaatttaatggtcatggggctgctaaatttagttgctgtgatatactattaaccgtaagattttgaaaatagacttagggtggagaaaaagtcaatgagtgaaaataacgaagaaacaacaacgattggggcgcgcttaaaggctgcccggacagcgaaaggcctcacaattgatgatttgcaacaaatcaccaagattcagaaacgctatttgattgcaatcgaagatgaacagttcgataaacttcccggtgatttttacgttcgggcgtttgttaagcaatatgcggaaacagtcgctttagatggtaacgcgttgttagaagaatatcgagaccaattaccgagtgttcatactgaaaccatcgttgaaaatgttgatgaagttcaacctacccgagttgctagtcgcgaacaacctgcttcaccagcgagccgcgtgcgtaactatttaccaacgatcatcgtcactgccattgtggttttgattttgttatttatttggtttatggcggttcgcacgcacgctggttcaagctctagcacgagtgcggacagttcttctgtacaagtttcgagttctaagaagcaatcgagttcgtcgaaagctagttcatcagcaaagtctagttctaaagcgtcttctgccaaggaacaaacaatcaaggctaacggcagtagcgatacggcttatactttgacgaatggtgcggataagaacaaagtggtcatcaagtctactaaggctgcttggacttccgttacgactaacggtactcagacttggcaaggaacgctaaaggcggatggctcacatacattaacgttaccaagtaatgctacgacggttaagttccagtttgggaacgcaactgccacgaccgtaacaatcaatggtaaggcgttcaattttaatccgaagaacagtacgtcacaagttcggacgattaccttgaccatcaaataacgttgcggaggaggcgggtactttgaatttacctaataaattaacggtgtttcggattattctgattccagttttcattcttattatggtgttaccccttagttggggacaggttgtgtgggctggaacaacaattccagtcacccaagtggttgcaactgtcatttttgcggttgcgtcattaactgacttagcggacggcaagattgcccggggtcaacacttggttacgaattttgggaagtttgcggatccactggcagataagatgttagtaatgaccgcgttcatcatcttagttcggttaaatgcggcccctgattgggtcgttgccattatcatgtgtcgtgaactcgcggtaacggggttacgattattgattgttgaaaataatggtaaagtgatggctgctgctatgcccgggaagattaagacaacgacacaaatgattgccatcatcttcctgctgctgaacaatgtcttatttgcggcaatccacattccatttgcggcaattatgttatatatctgcttattcttcgttatttattctggcattgattattttgttcagaatcgtgacgtgtttgcagatggcttcaaataaaattaatcatgagcgtctcaccgagtcttgcattcggtgagacgtttttgtataccattaacgtgttgcccttattaattaatcatgactcctgtcagtcgataattttaacgatgagtcgcgttggcaggttatgtcaaatgaaggtatttgaaaatgctaatctttttaatggggtcgatcgtcattttcgtatatacttaatgtaggacgataatcatcgcgcccacactgagtgtaatcgataggattacggggaggcatatatggcatgcaagcagaaataatcgcggttggtaccgagattttactgggtcagattacgaacacgaacagtacgtacatcgcacgtggattggccgaattaggaattgatagctattatcaaacggtggttggtgataatcggcaacgtttgtcgaccgtcattgaaattgcggcccagcggaatgacttagttattttaacgggtggtttggggccgaccaaggatgacttgacgaagcagacgctcgcgcattatttgaatgttgccttggttgaagatcaggcagcaatgcaaaaaattacggcctggtttgccactaatgacaaagtaatgacggccaacaaccgattacaggcattgtatccggcaggcgcgcaaccgttgactaatcataacggaatggctgttggtgcgttttatcagtcagaaaatagtgctgatttcttgttattgccaggtccaccccgtgagttagccgtaatgtttgattctgaggcaaaaccgaaattggcagctgcatatggggaacaagcccaaatctattcgcgagtgatgcgtttttatggcatcagtgagtctgaattggcgacccgggtgcaacccttgattgatgaacagcaggcggttacgattgcaccctatgccaagactaacgaggttaccctcagattaagtgcccaagctatgacggaaacggctgcaaggggaatgatcgacaaagttgaccaccagatcaaggctaccattgggccgtacttttacggttatggagacgataactcgttagttactactgttattaatcaaatgattgcggctaagctgagtattacagccgctgaaagcttaacagctgggctgtttcagagtaccatcggcagtgtgtccggggtctccgcaatctttccgggcggctttgtaacgtatgcgaatgaggccaaacatcagctagtgaacgttccacaagcaattattgacgctgagggcgtggtttcagaagcgaccgctaaggccatggcgagtggtgctaagcagcagctaaatactgatgttggtatcagttttacaggcgttgccggtccaggaaccttggaaggtcaaccggctggaacggtatggattggtcttgcttaccgtgatcgacccgtgaaggccaagcagtaccattttgctggtaatcgacaacaaattcgggaacgcagtgtgatggccgggttagacctattgagacatgcattgaatgaagatacggacttaaaaaaataatacgaacttttgttcgctttttgcttgcaattctaactttgaacagctatgatattaagagttagaaacgagcaccaaaggaggaaataatttggctgatgcacggaaagcagcactagatactgccctgaaaaagatcgaaaagaatttcggtaaaggggcgattatgcggatgggtgacgctgcccagacgactatttcaacgatttcaagtggatcgttggccttagatgacgcgttgggtgtcggcggctacccacgtggtcggatcgtggaaatctacggtcctgaaagttcaggtaaaacgaccgtggcactacatgcggttgctgaagttcaaaagcagggtggtacggcggcctatatcgatgctgaaaacgcactagaccccgtttatgcggaacacctaggggtcaacattgatgacctgttactttcgcaaccagatactggtgaacaagggcttgaaattgcagatgccttagtttccagtggtgcggtcgatattttagttgttgactcggtggcggccttagtgccacgtgccgaaattgaaggtgaaatgggtgacgcacacgttgggttacaagcgcggctgatgtcacaagcgctccggaagttatcagggacattgaacaaaaccaagacaatcgcgttatttatcaatcaaattcgtgaaaaagttggtgtgatgtttggtaatcctgaaacgactcctggtggtcgggccttgaaattttacgccacgattcgtttggaagtacggcgggcagaacagatcaaggaaggaaccaatattattggtaaccgtgtccggatcaaagtcgttaagaacaaggttgcaccgccatttaagcgtgccgaagtggatatcatgtatggtcaaggtatctcacaaactggtgaaattgttgatatggctgctgaaaaggatattgttaagaagagtggttcttggtattcatatggtgacgatcgcattggtcaaggccgtgaaaatgccaagaagtatttggacgagcatcctgatgtcatgacggagattcgccaaaaggttcgtgatgcatatggtatggatgcaactggtgaagaaacgtctgaaactgatgatcaggccaaagaagctaaggataagggaactgctaagaatggcagtaagggtcaaagtaagtccactaaagcgacaccagcggaaactgctctcgatctcggcgaccaaccaaccgaaaaatagacagtttgttatgcaacgcccaaaatatttattttgggcgttttttgtacatacttagcttgtttgcacgacaaaagtagcctgcagagagcggttgccataagactttaagttgacactattcgtttctaacattagaataacaagtgtgtaaataatcaaaatataacatctgaaaatttgtagttgattttatgttaactggattttggtggtgcggaggtggaaacatgaatgttttcggtataatcctcgcagtcatcgcaattgttgtcggttatgggattggttactatgtacgcaagaacgtccatgaaaaagaattggacgttgccaggaacacagccgaaggtattatttctgaggccaaacgggcagcggagactcataagaaagaaaaagtccttgaagctaaggaagagagtcatcgctaccgggctgaagttgaaacggagttaaagcaacgtcggaatgaagttcaaaagcaagaagaccggttgcttcaacgtgaagaaactttagatcacaaagagaatacttttgaaaagcgcgaggatgctttaggtaaaaaagaagataagattgccaatgagcaaaaacgcgttgaacaacagcaacaaagtgcagcttcactaatcacgcaacgtcaagctgagttagaacgggtcgccgccttgtcgcaagaacaagctcgcgatcagattttgacccaaacgcgcgaacaattaacgcatgaacgggccgtgttaattaaagaaaatacggacgaagtgaaagcgcagtctgaaaaagaagccaaaaacttaattgtccaagcgattcagcaaagtgctgccgatatggtttctgaaaccacggtttcggtcgtttctttgccgaatgacgacatgaaaggccggattattggtcgggaaggtcgtaacatccgaacgttggaaacgctgacgggaattgatttaattattgatgacacgccagaagccgtcgttttaagtggttacgatccgattcgtcgtgaaatcgcaaagatcgcgcttgaaaagctgattcaagatgggcggattcatccagctcgaattgaagaaatggttgaaaaagcgcgtaaggaaatggacgaaaagatccgtgaaactggtgaacaagctgtctttgatttaggattgcacgggatgcatcctgacttgatcaagcttgttggtcggctgaattatcggaccagttatggtcaaaatgttttgaatcactcaattgaagttgcgaagttagcgggcgttttagccgctgaacttggtgaagatgttacactcgcgaaacgcgcaggattattacacgatattggtaaggccgtcgatcatgaggtcgaaggttcccacgttgaaattggcgtggaattaacaacgaagtacaaagagagccccgtcgtgattaacacgattgcctcccatcatggtgatgtggaagctaagtcgattatcgcggtgttggttgcgacgtctgattcaatttcagccgcccggccaggtgctcggagtgagtcgctggagaattatattcatcggctcgagaagctggaagcaatcgctaataatgaggatggcgtcaagaagagctatgcgattcaagctggtcgtgaaattcgagtcatcgttaagccaaacgagatttctgatttacaggcaacggttttggcgcacgatgtcaaaaagcagattgaaaatgaacttgaatatcccggtcatattaaggttacggttattcgggaagttcgagcagtggattacgctaaataaccgggaaatgagtttaggtcttgacctaagctcatttttttagttgccagcagaattcaatcacgttttcaaggctaaataatgctaaaataattggtataacgttaaaacaagggagcaatctatgcgaattctatttgttggggatgtcatgggcaatgtcggccaaacggcggtcaccacgtacctacctaagttaaaacggcgctacaagccacaagttactattgttaatggggaaaatgccacccgcggccgcggcattaatcaggaagtgtataaggacatcttgactgcgggggctgatgtcattacgatgggcaaccacacctgggataataatgaaatttttgattttattaatggtgctaagaagttgattcgaccgttgaattttccgccagcgacgactccgggggttggttatacgatcgtgaaggtcaatacggtgaagttggccgtgattaatcttcaaggaaacgtctttatggggcaaaatttagcggatccttttacgactgtccaaccattggtcgagcaattgcgggaagagacacctaacatcttcatcgactttcacgctgaaacgacaagtgaaaaagaagccatggcgtggtatttggatggtcaggtgagtgcggtagttggcacccatacccatgtgcagacgagtgatgaacgcgtattgccaaatgggacggcctttttaagtgacgttggttttacgggtccgtataatggtattttaggaatgacccgtgagaatgttattcagcgtttcttggaacaaatgccgacccgtttcaacgtgcaagaggatagttcggcagtgttgtcgggttgtgtgatcgacgttgatggtcagagtggtcgggcgaaaaagattgcccggattttgattaatccggaccacccatattttgatgactaagatttacgatagaaagtaggattaagcgtgccacagaaaacaaaagatacaccgatgatgcgtcaatattttgcagttaaaaatcaatatcccgatgcgtttttattttaccgacttggtgatttttatgaaatgttttttgatgacgcgattaaaggtgctcagttattagagttgaccttaacgacgcggaatcattcggcggaaaaccccataccgatgtgtggggttccccatcgagccgtgcaaaattatattgatattttagtagataaaggttacaaagtcgctatttgtgaacagatggaagatcccaaattagccaagggcatggtcaaacgcgaagtgattcagctcgtgacacctggtacgacgttggaacggggcgcggaacaagctaagacgaacaattacttgactgcgctgattcagcgtgatcaacaatatggttttgcgtacgccgacttgtcgactggggaactaaaaacgagtgtcttaacgactaacgataccctaattaacgagttgaccagcttgcaaactaaagaaattgtggtcgacgactctgttgctagcgatttgcgcgatcaaattaagacgctaggaattctaatttcagaacagaataacgtcaccccccaggctgaattgagctacttgactcaggacttgacggtcgatttggaacaacaggtcgtggaacggttattgatgtatattacggtgactcaaaagcggagcctcgcgcacttacaaaaggcgatcgcttatgagccgtcatacttcctgaaactcgatcataattccaagtataatctggaattaatgaagtccatccgaactggtaaaaagcaaggaactctcctgtggctattagatgaaactaagacggcgatgggcggacgactattaaagcagtggatcgaccggccattgattgtgaaggccgatattgaaacgcgtcaaaataaggttgcgacgttattagatcattattttgaacgtagtaacttacaagaagagttgactaaagtttatgacttggagcgtttagctggccgggtggcttttggtagcgtgaatgggcgtgacttagtgcaactcaagacatccttgcgtcagattccaaagattcggtatatcttatcggaattagatacgcaggtatttaatgatgaagttaatcagctggatccagtcgaagacgttgcggatttgattgacgcggcaatcgttgaagacgcgcctttgtcagtaacggacggtggtgtgatcaaggatggttataacgagcaactcgatcaatatcgggatgctatgaataatgggaaaaaatggattgctgagttggaagcccaggaacgggcgacaaccggtatcaagaatcttaagatagggtttaaccgggttttcggctattatattgaagtcacgaaggccaacttggcccaattaccgaaggaccgctatgaacgtaagcaaacgttaacgaatgctgaacgctttagtactcctgaactgaaatcgcatgaaagcctgattttagaagctgagagccattctacggatcttgagtatcaactcttcacaaaggttcgtgaaacggttaaaaaggcaattcagcggctacaaacattggcgaaggcggtcgcagcaattgatgtcttgcaaagtttcgccgtcgttagtgaagattaccactttgttcgaccgaaattaactaaatcacatgatttgaagatcgttgatggtcgtcatccggtcgttgaaaaagtgatgggtaaccagagttacgtcccaaataacgtgacaatgtcacctgatgagacggtccttttgattactggtcctaacatgtccggtaaaagtacgtacatgcgtcaattagcattgacggtcatcatggcgcaaattggttgttttgtaccggctaaatcagcgcaacttccaatttttgaccaaatttttacacgtatcggtgccacggatgacttaatttccggtcaaagtacgtttatggtggagatgcaggaagccaataatgccttgcaacatgcgacagccaatagtctagtgttgtttgacgagattggccgggggacggcgacttacgatggcatggcgcttgcccaagcaattattgagtttgtgcataaccatattcatgccaagacactgttctcgacgcattatcatgagttgaccgcgttagatcaagaattatccgggttacgaaacgtgcatgtgggtgcgactgaacaggatggcgagctcgtcttcttgcataaagttgagcccggggccgccgataagtcctacggggtgcacgttgccaagttggctgggatgccaacgagtttattggaacgggccaataagattttaacgagtttggaaaatcaaacgagtacggtatcgacgacagcggcttcgattgctgctagtgatgctgctaatagcgtggcacctaacacagcggcttcaatgccggttgaggccgccgatgagtcacagccagtagaatcggagaccccggttgccgaagctccggtcgctgaagccggtgatgaacagctgtcgttatttgctgagccggcggtgacggatgcgaagggtgaaaaggttttacaacagctgaagacgttgaacttgatggcgatgactccgatggatgtaatgaaccagctgtataaatggcaacaaaaattaggcaagtaggcgcattttaactcatcataaatgagcgcaataagctgttatgatgggctattggtgcgtctgacggacaggtaggtcgacactagtcagttattgctagttgtggtaatcgaaaatgttcgtgcaggacacgagcttaattattttatgtgaaaggaccgatggaaatgggaaaaattcatgagttatcttctgtgctggccgaccagattgctgccggcgaagttgtggagcggcccgcctcggtcgttaaagaactggttgaaaatgctgttgatgcgcacgcgacgcaggttgatattttggtgcaagagtcgggtgttcagtcaattcgggttatcgatgacggtgacggtattgatgacgctgaagtcctgaccgcttttaaacggcatgcgacgagtaagatcacatcacgtgaagatttgtttcgcgtccattctttaggttttcgcggtgaggcgttgccaagtattgcgtcagtagcggacgtggtgatgaatacgagtaccggcgccactgggacgagtattcattatcgcggcggtaagctattacaacaatcgcccgctccgttgcggcaagggacggacattaccgtcaccgatttgttttttaatacacctgcgcgactaaaatatttgaagtccccccaaacggaattagcgaatattttagacgtggttaaccgcatcgcacttagctatccagcggtggcatttcggttagttcataatgcgaaagagctattaaaaacggctggtcgcggtgacttacaacaagtcattgctggtatttacggtgtccaaaatgcgcgcaagatggttgccattcaaggatcgaccactgattttaaattgagtggctttgtggctttacctgagctgacgcgggccagtcgccagtatattactgttctgattaatggtcgtgctatcaagaaccagcaattgaccaaagccgtcatcaaaggttacggctctaagttgatggtcggccgttatccaatcgcggtgatcgctttaacaatggatcctttattggtggacgtcaatgttcatcccacgaaacaagaagtccgtttgagtaaggaaccagaattagccaaactggtcagcaccacgattacggaccggttagtggatgtgaacttgattccgtcagcattgaccaatcttggcagccatcggcgtgaacatctaaatacagaccagctggcgatggatttgaacgccgtttcgtcacagtatcaagtagcggataagacaacgccggcatcgactgagcagtttgcagcctcgctggcagcggcaaccatgcagcccagctcggcaacgaccatggtaagtactacttcagcacagccatcagcggtaaaccgtgcagcagttagtgcggttgttccgtcagaatcagcggcaagttctgccaacccgccgattatgattagccatcgcgacgaactgacagctactccagttcaagcatttgaccagcgttaccagtcagaatcaggcgctttaccctttggtgaaactgctgaaccgttagaaaccagcacggctgcaagcgcgccgactagtgaagcgccggatacggaacgttttccacagttacgctatcttggtcagatgcacgggacttatctgttagctgaggcggatgatggtatgtacattttggatcagcatgcggcccaggagcgaatcaactatgaatattatcgccaagcgataggtgaggttagtgcggatcaacaaaatttattggttccgattattttagattacccgacgagcgatgttttaaagatcaaggaaaaattgccgttactagcagaattagggattcatctggaatcattcggcggcaacagcttcattgttcatgcccatccgacctggttcaaagctgggcaagaagaagatacgattcgtgaaatgattgattggctcttacaggatgataagttgacggtcgcccaatttcgggaaaagtcagctatcatgatgtcctgtaaacgggcaatcaaggccaatcaccatttggatgatcagcaggcccgcgcgttattagccaagttaccgacctgcgagaatccgttcaattgcccacatggccgcccggtgacggtacacttcacgaattcagacatggaacggatgttcaaacgaattcaggatagtcatgaagcacgtgattaaagtgattattggcggcgtactcgttactttagtatgattcgtaatcgatccgcattgtgcaagtaaatatttcatgaattatgattaaaacgtgccatttcttaagttcaaaagcagccagcttaagaccgctggaaaaagttcggactagcgtagacttgcttggtgtgtgcgccttacaccgacttccaggcatttctgccaattgccggaacgtggtgggcacagatttgagccgaaaaatcacgtctcaaatactggcctttcactaaccaagcacaagacgcttgctaagtgaaatttcaccactgggcattggccgaaacgccttccagtcgggacagtattcgaatggctgacatggatgcaccaacttttgatgaatttgtcgttgctttttataaacgataattttgttaatcaactgtcagactgaaaataatattgagatggctcactaatcctgaatcggtgtagtaggatttaatctcttgacagagtgcttaatgtacctagcgctttgtttaaacttccagcatcaaaatagtcagcgactaattgtaccaaattaggtggtcgttcatcagccattcgagcggtttcccgaaacgtgttcggtgccactaaagccttgtgcttgctacgccaacggactaatgccaaaaccgcattaatccgttggctaggcaatgctcggcttcaacccgtgacccctcacaggcttgagactggaggggctgggtgacaatgctcagtagccaaattattcttagctggaagtggtctgcttccggcttagaataagactcgtatttgagatgacgcgggttatgcgttagctcaaatcgacgtcggctgcgttccagcaattggcacccagccccggaggtcggcataggacgcacaccggctgacgaacaataatctaaacttggcacgttttaatcatgactgatactgaataatcacgaaccgaatgtgttatcgaataaaaatagcaatgttgagtagaggctgtgacataactagcctctgtataagcgaatgggacgagaaaccgaattttggtttctcgtcccattcgcttacgcctttgatttttaaagttggtccctaccgtgaccagtttcataataatgaaataattcaacaaaaaaattgcgcttcagatgttgattctgaagtgcaattttttgtctaagttaggcataaacatactagcatgtttgtatttaaacggagtggcttgcagggtgaattataactttagtatcgacatgcgcgctggcttccgcaatcgtacaccgtcagctaatctggcagcttatttgtgggcatctttctttgcttgttccactaaaatattatcgaccacgtcttgtaagctagtcttagctaaccgtgcttcggccgccgtttgcgcgtcttgatagtattgtttcagaacggtttgaatattgccaccaacaatacaatccggattggtcttaggatcgacggcgagtagcggcttatcgccctcaattgcgtagaagacgctgagcagtgaaatttgacttaaaggtttggcgagtgccggttgagcagtaccgggcgttgttgtgattagtccggcttgtcgaagcttgctcatcaatcggcgaacaacgactggactagtttcaatgctgcgggcaatggcgtcacttgttaatttagtatctgcgtaaattttaatgtaggctagtaaatggatcgagtcgctaaagcgggttgaaacacgcatataatcacttcctgtaacttaattggttactatgattataaataaatccacttataaaagcaattaacgagtttagttaagctgatgatgtaacttttataaagagggttgttttgggggaccgaatcagttatgatgtaaatgccaaaattgagcagttactgcaaaaaaggagcttatcatcatgagtgaaattgaaaccatccaggcctattatgcggcttcattgggaaaggatggtcgtattacccggacccaacggcaaattttagccgccgcgctcgacttatttgcagaaaaaggttacgaagaagttggcactcgggagattgcagagcgggccggtgtcgctgaaggaactttatttcataattttgttaataagaacggtattctggacgccattatgcagccgattgtgcagaatattttgccaacgatgttgaacactttggaccaggcagttttagatagtcctaaccagactttgcaagcatttgttgtcgcccttgtgcgcgatcgggtcgcatttgtcacacgtaaccgagcctccttagccgtcattttgtcccaatttttcaataatgctcaggatcgagcggccgtcttagggatggtcttacctagcattttggcgcaggcgaatgaagcgatggatcgcttgaaagccgctcgagaattagttgattggccgaatcgcatgattttacaattggtgttttcaaccattgggggatatttagtcgaacaggttctctacccacaactggatgatttgagtgatgagcaattgattcactatctcagtgattttttagttaatggtttgagcccacggagaatccccttacaagatgataataccgcgtcataacaagctttagggatgccaaagtaataattaataatagttgactaataggttaatggtgctatactaccaattggaattaaagtgagtgctcaattaaggggacgcactgttgaggatcacgtagtagtccacaacctgaattctaaaccaatagaagagagggtttcataatgaaatcagcaaaaacgaaggatcacgctaagatgaaagctgccgaagaaaaggcgattcattcaacgggtgccgatagtaagagcttggacgaagtcaatgggagtgtccgggtccctaaggatgccagcttctggcgaactttaattgcctacactggaccgggtgcactagttgcagttgggtacatggatcctgggaactggatcacatcaatcgcaggtggatcacagtacaaatatgcattactttctgtgatcctgttatcaagtttaattgccatgttgctacaagccatggccgctcgtctgggaattgtgacgggtaaagatttagcacaattgacgcgggaacgaacgtcaaaaggaatggggatttttctctggattattactgaactagcgattatggcgaccgatgttgctgaaatcattggttctgggattgctttgaagttattattcggatttccattaattgtcggtattttgattaccactgccgatgtcttgattctgttattattaatgaaacttggtttccggaaaatcgaagcaattgtggcaacgctggttgccgtgattctcttcgtcttcctgtatgaagttattatttcacaacctaatattccagaaatgttaaaagggtatgtcccaactagtcggattgtcagcaaccgttctatgctatttctagcactcggaattgttggggcaaccgttatgccgcataacttgtacttgggatcatcaatctcacaaacacgtcaagttgaccggagtgacgaaaaagaagttgccaaggctgttaagttcacgacaatcgactccaatattcaattgtcagtcgcgttcgttgttaatagtttgctattaattcttggcgccgcactgttctttggaactaagggggatcttggccggttcgttgacttgtacaatgcacttggcgatagtaaggtcgttggctcgattgcgagtccgttactcagtatgctctttgccattgcgctgttgtcctctggtcaaagttctacgattacggggacgttatctggtcagattatcatggaagggtttatccgtttgaagatgccactctgggcacaacggttactaactcggttaatctcggttacaccagtgttggcttttgcgatttattatcatggcaatgaagcgaaaattgaagatctgctgacgatgtcgcaagtcttcctgagtatcgcgttaccatttgccatgattccgctagtcatgttcacgagtaatcgggcgctgatggggaacttcaccaaccgtgtctgggttaagtggacggcttggatcgtgacggtgattctaatcatcttaaacatttaccttattttacagactatcggtctggttaaataatcaaacattaaaatgagctttccagggattgcaaagaattcctggaaagctcattttgtgttttgggaacagctgcaatgcaagataccgattcaaagcgccaagtgctaatacgtaccagtaattggcgattaaccgactttggatggccagtcttgcttagttggtatgatggtaaacggggtcgcagtgatgaggtccgtgaggcaggggagcaatccggtctcaaggttatataaatcgtgaacgtgtgcgctagtttgaccgtgctcagccatcttaagtagttgaggctgggtgaactggagttgactggctggtagaatcaggtccggttggctgcggcgtgtcaacggttgagcgtggtcgtgaaccaggtaagcaaaattaggcgccgtattgagaattagcgttaaaacgctgatttcatggggatctaatttggttgctaactggttcgtttgactaggggaataaaccatggcggcgtagatttgaggcgccagctcgggtaattggcgactaggcggtgtcagggtgaccgtcagtcccaattgccagctggcaagcaacaatcccggaatcgttacgacttgtgcggggctcagtagaatggcttgtccggcatgcacgttctgttgttgcagactagtttcacacagtgcgaggtcttctaaaacatcggccccggtataccagttgccatttagatctttcagaactggttcggcatattgacgttgtaattggcgggtaatggccttagtcagctgactcatcgcggggcctcctttaagggtttaagtgacggggcggaaattaagggtggcagtactactttgcgttagtgagatacttcatcttagtgatactctggctactagcgtcaatggttgctaacacttgattttgggtggatttaacaacaagcttagttggctgcggtgttaaatcatgtttcggttggctagtcgtggcacctgttgcgagtttagtatcacgagtgactttattgacgagtgtggtggacgttgtctcaggcttagttgtcgtcgtatcagcagaggcggaaacggaagtggcaaagtgggttccggcggccattaaagttagggttagttttttgaatgtgtttttcataataatcgaactccttttagttgttattatcggtggcggtcagtgaatgattattgggcagctggcattaaccagtcgttagagagtagttgatggaagtgacgaccaagtgggacccataattgcgaacggcggatgttttttaacgtgtcccagaataatggatcttgtagttgttcatcactaagtttgactttaacgaattcgccctcttcagttttcgcaatcaccagtgggtaggtcaccttaaccaattgaacagcggtgatatttttaatttttggatcagtatctaataacatatctacatagctccttagttgttgtgagtcattctgtttttatgagttaatttttaaagttggtttgtttaattgaatgactatagtttaccggcatatcgccgtgggaactatcgactttccataaactttatctaagaaattcttagattcagacttagaatataaaaaataccatgaaaattgaatctgagcaggtaatactttggcaggatcaagtactagttaaattaacaaccgtttcaagactgttaatgtccttaaaacggttgttaagagtttgtttgtaaatgaattagcttagtgtgcagggcggttaataatactaatggcaaagcctaataaagcacaaataagagaaacactaaaggaccaggttaaaccatgggcaaaccaagcaggatgtgctggcaagtaagtactaactcgatatccagcatcgatgctcattgttgtaaatagtgcaagagaaccaagtgcgacgcctaaaatattgccaatattatttcccaaagactgtagagaacccgctactcctagctgattttgtgggacgactgacattagtaatgtgttatttggtgcaatgaaaaatccagtgccgataccgttggaaattaacaaagaaataatgagggttaatgaagtatgtgaatctaggaataagaagccaatttgcgtaattataattaggactaggccggttagtagaacaagctgttgagagaaaagatcactcaaccagccaccaagtggggcagcaatagccataataagtggaaaaatcagcattaatattccagtagtaccaactgaccagttcaaataatcttggagatagagtgggaatataaagctgaacagtgcattaataagtggtatcagcattccgactagcaatgctaagctgaaggtacgattcttaaaaatggatagtggtaatagcgcattttttcgatgcttttccaaataaataaagtatagtgtaagtgctaatgtgataatgaagccaatgataattagcggctgcctgaaaccaatagtctgccctgcttctaatacaacaaagaatagtgtgatgataatgaatagaatccctgcgccccaaccatcaagtttagtggcttgttgccggccatgatttttgggaagaaataggtggcctaaaataatggcaatgattccaagtggaatgttaatcataaaaatagcattccaagcaaactgctgtagtaaaaagccacctaaggcaggtccggcaacaaaaccagcggaaataaacattgtattgatacccatggcagttccccgggtgtgattatcaaacagttccgaaattaaaccatagctgtttgaaagcgttgcggcagcgccaactgcttgcacaaaacgagccaatagtagaaactcaaagccgaagttgacactggccattagtgagccgatagtaaagctatacatacctaaagtaaagattctacctttaccccaaatatcaccaagtttaccgaatgttaccagtaagcctgatagaatgaccatataacccatcacggtatatgtgatctgactaattggaaccgcaagtgattttgacatgataggtagtgcgatattaatgattgatgcatcgagattagccataattgtaaaaataccgatgacaatcattgctaaccaagaacgagttgttgttttcatgataaaaattcaacctcctattttttgaacatttgaaagtataacaagttcgtgttacactaacgcaagcaaaatttaggaggatacgagtatgtttacaattacggcgaccgctcagaaatatggtgtgtcgaataatgcactacgttactatgaaagtgttggcctaattggtccgattaagcgtgatcaaaatggtatccgacaattttcggctagtgatcaagagatggttaaccgaattgtacatctccggcaattaggcgcgtcaattaaagagattcagcaatacagtttccgtcctgaagaagtaacactagaacgtacagttgcactaaaaaaatttctgttacgtttaaacggagatctagaagcacaagaggcacgaattaaaatagaaaaacaatatttaaaagcaaaaatagagcatttggatggtgatattttgagtatgaaatctcataaaaccacgcagatgggttagtaataattagtttctgcatatcaattcagaatagtcttggaggtatctttgtgattgggtggcacaagaccaaaagcgagtcctagatttttctagtgactcgcttttttatgagagtaattattagaaaataatagtacttgttactatagttgccagctgaccgtaaagatactcccggatggctggttgtcggtaattttaatgttggcctgattcaatgtgactaactgttgaacgattgctaagcctaggccactgccttcgattgcttgtgaccgagattgatcaacgcggtaaaaacgctgaaagacagcctgtttttggtcgtctggaattccctcaccatggtcggctacagctagttcgactgcttgatcagtctggtgcaaactcaaggtaatcggttgatcatgtggcgagtatttatgggcattatcgagtaaggccacaacgatttgttgtaacatttccgcattaccttgaacgtggatgttcggatcaattgcgagcgtcaatggttgatcaattgatggctggtaatgttcagccagtgacaacattaatagtgataggtcttggtcagttaagactagcttagcgcgatcagctcgtgaaaggtgaagtaggttctcaatcagatgttgcattcttagtgattcttcatcaataaactgtaatgattctggaatcacttcggggtgggcgtcaccccgccgcttgattagactgagattaccgcgaatcgcagcaatcggggttcgcagttcgtgtgaagcatcagaaataaattgacgctcatgctgcaatcgttgattttgcgtgaccaatagttcattaaaggcccgaccgaggtcgttgatctcgcgggggctagcaggcacgtctaaggtgggctggtcgctatctggattgttcgatgtgtacttggttgcgtgtaacagtttaatggttgggtcactcagtcgtagtgctaaacgatgggcccaccaagtccccaatgccagggcggcacaagtgacagccagcatgagcagaatcaaaataagcagactgttgaacaatcgccttaagctgacccatagttggtaagtgttatgcccatctttttcactataagataagaagaaaccaaatccgcgaacgtagactaacggccctactagcttagtctgttgcttggtgaaaaacgatttggacgatggggtagtgatgatcgtccgcttcgttttagtggcggtcgtcaaggttgctttcttggtggttacccggataaatgccggttgtttcgtattgcgtgtcgtcgtattgttccattgaataaaactggggacgtctttgatattcgcctggttaagactgctcatcaagtcacgggcttccctagtcgtattgattgtttgctgagtgccgaccatcagaagggtgatcaagctaaccaacaacgtaattgtcagcattagtcggcggatggccttattgatcagctgttcataggtcggagtggtgttatttttgggcatcagacatcggctcccttagtttatacccgacgccgcgcactgtttgaatgagtggggaggcgccgtttgtcgtgattttattacgtaaataaccgacataaacgtcaacgacattttgctgaccgagaaagtcggcgccccagacttggtcaagcaagtcatcacgggtaaagacttcgtcgggatgagcgaggaagaattgcagcaaatcatattcacggtgagttaaggtaacttcttcctgcccgttagtaacgcggtgggctttggtatctagctggatatcatccagttggtagacttgattgggttcaacttgattttcaatgcgtcgttggataacccggattcgggccaataattcttcgatttcaaatggtttggtgatatagtcgtcggcaccattatctaacccggcgactttatcaccgacataatctctagcggtcataataatgactggtacttgatcgtgtttgcgaatgcggcgaagaacttccataccgtcaagttttggcaacatccagtctagcaggatgaggagcaactcgttttgatgcgcttggtaggtttccatagctgccaaaccgttagccgctaccaaaacgttgaaatcctcaaattgtagttctttagtcaagtagccagatagactgccttcatcctcaacaattaaaatcgtgtttttcaatgttatgctcctcccaataaccctggtttatgtctaattatagcgaataattatgacgcttttccgatattttgacttatttttatggatttgtgtgaactaaatgaaagcgtcaccggacttatgctaaaattggactatgaaaatggaaggtaagtgagtgacatgggactttttcgtgacgccatgcaggcactgtatcatagtggtcattatggttacaacatcaatgtaaagaagtcggctcccgccgttgatccgaaggaagtaccagcgattgcggcgttaggacgtattaatcgaacgcccaactttaagacgtggtccgttgattcgccatataaaacggccgaatttacggctaaattaactgacgcagtagcaacttgtgatttggaaatgcaggatcttgagatcaaaccgcagatcgatggtcggtggggcgatcaataagcggaatttgttcccataaattctaatggtcatattaatttaatgatagaccaattaatcaatagtgacggggtgagtcaatgttttcgtacgatcaggtccagcagttaaaccgcttggaaattgaaatttataagtatattgtgggtcatcccgctgaagtaagtactatgacgattcgacaattggccgaccatagtcacgtctcagcaacgactattttgcgttttctaaagcacatgggctatgatggctacgcagaatttaagttcacattaaaagaacagttacggcaagatgccacacaaccgttagctcagacagttgtaccgatgcggacgttttttgaccgcatgaacttacctgatatcacggctaaacttcatcgggtcgcagaactggttcatcaagctcgaatggtcgtactgattgggtcagggacgagtgctggcctggccgcgtatggcagccatttattcgctaactttggtttatatagcttgatgattagtgatacgagtcagccccatccggttcagcaacaggatttatcggataccgtctttttcgcactttcagtatctggagagtctgaagatattattgaacaaagcgtttattatcggcagagtggcgcgaaggtggtcgctattaccgctagcagtcattcgacgttagctgggattgcggacgtggtgttaacttacgataccccggaagttcaagcaatcagtggtggtagcaccttgtcccagttgcccatcgtttattatctggaacaattagctatgattattcagccattaacgtaaaggtaattcaaaccaatctttggaacatgttctaaaaatggaacaaattccgatggatggaacaacacccattttagagtgaaagggtatacattttgagaatgacaggtataatgaattttgtaggaagcgtattcatgggtacaaatgtcagatgacaggactactttgtaacggacgaactcaattttatgtaaacggttaactattaattgaccgttagcttacttaaattattctgattgtttgagaatgttcgttaaatgaatatgcacaacaaattattttagggggtcacgacatgagcgaaaacaataacaagtcgagctttgttaatgaccgacttgtccctttctttggcaagattgctggttctcgtcacttaattgccttacgtgatgggatgacattggcagtgccaatgattattatcgggtcggtcttcatgatcattgcgcaattccctatcaagggttatcagacctttatggccaatacctttggttcgaattgggcaacgatcgtccaatatccaactaacgcctcgttccatatcatgggcttgattgcggttattgggatttcttataacttggcaaagagttataaagtcgatccaatctctgcctcaattgtttcgttaggcgcttggttcttaacgattccattaaacaccgataaggcaggagcactgtgggtaccattaacccaacttgattcggcggggttattcacggcgctactgattgggttgtttattactgatttttacgttttcatggtgcatcgcaattggacgattaagatgcctgatagcgtgccaccggcagttagcaactcgtttgcagccttagtacccggtttcgtcatcttattcttgatgtggttactgcggttggctgttgaagcatcaccaatgcagagtattcctaacgtgatttcattcgtcttagctaaaccattaggcttgttgagtaacacgttaccaggggccttggttgctgaattcgttgtatgtattctttggattttcgggattcacggtgccaacgtggtttctggggtcatgcaaccaatctggttagctgcgatgtctcaaaatgcggaagcgcttaaggctggtaaggctttaccaaacgttgtgacacaacaattcttcgacaactttgtccacatgggtggttccggtgcgaccttgggactggctttcatgattgcctttgttgccaagagtgccgaattcaagacattaggtaagctggttatcggacccgcattgttcaatatcaatgaaccaattgtcttcgggttgccaatcgttatgaactatcggattgccgttccgtttatcttggcaccgttagttaatgttacgacgacttacattgcaatgtcgacgggcttagttgcgaagaccgttggggtcatggttccttggaccacgccgccaattatctctggttacttagcaacgatgcacatctcaggtgcggtattacaaattgttaatattgtgcttgatggtgccatctactacttcttcttcaaggccttagatcgtgataaggttaaggaagaaaagacctttgctgctaaagaagctgctggcgaaacggtcgaagcttaagttaaatcattaatgtagtaattgtataaataccaccattagcgacttgctgaaagtctgttgatggtggtattttaatgtcgatttttgagaagcgcgtgcagattaaagcgaaccgagtgacttggaattgtcaccgggttcgccttttattaacgggtatgaaattgtgggtgcaacattcgggggtgaccatggtcagtacccttgtactgcaatagccaataagcgttttgcggcaaagcgctacgggcaatgacgtgtgcaacggtgtagcgaatcgtgtcggcattagcgtcagtccataaacgccaagttggtaacttagctgcttgaaccggttcccaatcgcccaattcttgttcactagtagttagtgcggtgagtaaatcaggccgttcggaaccagtcagttcgatgtagtagcaatacgcttgcggatgcagggtgttgggctggctcatgatgagattgctcctttggatggttttaacgagttatcgttgacttaaataaccttatcatcaatcatagtacaaccgtttgactaaattgactagctttttcgcttactgttattaaaatgtaatattcaaacttgcaattaaaaataattgagtgttgcgccttgacctggaacgcgtttcagcacgtatattaagtggtgaaaataacgagggggtgcagcacgaatggaaacgggaattttaaaacagattgatttaacaacgacaacggaacggtatttcttcgtgcaagtacaacgactggccgactatgtctggattcgctcagttcaaaactttaagcctttagaattaacggttcgggtgagtgatttacaggtgaacaagcaccaggccgttgctgaccgggggaatatcaaatatgagtttaacgacgataccgggggactggtgacgcaacttgctggctgggtgcactaagacggtgacagacaagcagtaactgtgatactttaggcaatcaacaaccaataatactaatggcagcaatcaattttaactaggctaggactaaatcaggcgcgccactgaaggctataatgcttcagtggcacgcctgattatcattaaaagatcacttggtattatcactgtaagtgattttatctaaaccttgggtgtcataattgagattggttttgccgtcatacacggtattcttggcgtttagcttggtttccatgttggtaagggtctcagtactgagccccagttgggtccgaaggcggtccgacgtttgttgcaaggtctttgtacttaaaatctgataggaactcgtattgatccaagcgggtgagccaatgacttgagtcgactggatgtgtttcatattggcacgatcatgcgtcgctaacccaacaaggtcgttaaagctaaggtcagtttgtaaattacccttcagtgaagtgagtaattgattgtagcgactataggtcttagtctcggcgagtttggcgagaaccgcccgcatgacttgttgttgccgtaattgacggccgtagtcgccccgggggtcctgataacgcatccgtgtataagatagcgcctgtttaccattgagatggtgtttgcccttggttactgtgatgtggtcgaatgaaacgttgagtggactagtgatcgtcacacctccaacggcatccacgatttgtttgagaccgcccatattgatagttgcatagtaatcgataggcacgttgaatagcttgctaacactagccttggccatcttggagccaccaatattgtaagcggcgttgagtttttgaacatttgtgtcctgatcaccgaccatttctgctaatgaatcgcgtggaatgctggtaatgagcgttttcttggtctgcggattgatcgtaacgaccataatggtgtcagaatttcccttatcaatacgaccgtctgccccggtgtcaacacctagtagtaagatgctgagtggcttagtcgtatcaattttagtactgctgtttcccgtatagatcgtcgactggtagcgcgcctgtgcctggcgaataattaagccaatcgccacgaatgcgataacgataatgatgccgaccgcaattaacactggccgtaattttgaagatgctgaatgccgcatgttcaaatcctcccttaattaaaggcgttaagatggttccccggataacgtctttgtcttgaaatcactgtttctagcatacccggtcagtacgatcccggaaaatacttattttgagtgtacttaatttaaaaaatagataccacctaaaagaattagattggaaactgagcaaattaggagcggtcacttacggacagtattacggcagaaaacggattcttggcttatactgacagtgaacttaaatatatgaagtgaggtttggtaatttgacagtctttcgcgcattttctaaccaagaagttttagattatttagcaacgcaagtcactgacgggcaggtcttcactgacgaggagacgctgaaaaaatactctttcagtccgcggttgaccgatgacgatagtggccttgccttagcctatgtcgaagcacatacgaccaaggacattcaaggaacgttgaaaacggcccgtaaataccacatcgcagtgattccccaagaccaaacaacgagcactgttatcggtgcggacaggttaacggacagtctgattctttcaaccgccaagatgaatcgaatcatcgaaattagcaaggctgattccatcgccgtggttgaacccggcgtcgttaacggtgatctggataaagaagcacgcaagcagggtatgttctacgcgccggaccctggttctaagcccatctctggaattggcggtaatgtggcgacaaacgccggcgggatgagcacggtcaagtatggggctactaaggacaatgtcttaggcgttaaggtcgttttagccgatggtcgcgaagttaagttaggcggtcggacgctaaagcaggcctttggttatgatttaacgcaattgatgattggttcggaaggcacgttaggaatcattaccgaagtaatcgttaaactgttgccgattccgctagggacccccgtgatgggcgtcgcctttttcgataatatgacggccttggctaaagcagtcacggcgattcgaatctccggtgtttatccaacgatgctagaggcattggatggcaatacggttgcggcactcgatcgttacgagaagacgcactatgctaagaatagtgcggcgatgttgatctttaagcttgataatggtggtcaggatagtatggcagtcgttaagaagatactggccgaacagcaagccaacgatgttaagattacgaccgagcctaaggaacaggcagcgctagaacaattacggcgcgacatgctgccggcagtttttgctggtcagaatcatattatggaagatatggccgtgccattatcgcaattagccccattaatggactatattcaagaactatccaagcggttagacgtcgaaatctatacggctggacatgctggcgatggcaatgtgcacccgaccttagtgtggtcaacgtcggtaaccgaagtgcctgaaaaaattattattgcgctacaagaaatgtttaagaagacgctggcacttggtgggacgatttcgggtgaacacgcagtcggaatgttgaaaaatcaatggaacaatgccgaattaggcgaagatgttgatatgttgcaacatcagatcaaagcactctttgacccgatgaatattttgaacccgaaacgtaaaatcaattaacccaacgattacaaagcgcttaagttttgatagcagttgttggtcagatattgcgtaacttggtcatcgtgtcttattattgagatagtcccaaaaatgagttgttggttaatgagtcactaagaatgtgcagtgtggattaaccgatgcgaaggaggccccaagtgatacctaagagtgcgcgaatccgaattgaatttgatgccgaagtactccgcaacgagatttttgatgtgcatgacttcgccagttttcaaagtttctggcagcgatttgagaatttcttggccgatcgcatggtcgttggtcacctgaacgtgttagagggccgcggcctgattcctagtgattttgcagatgttgacggacacttagcttaccaagttggtgaagatgcgcaccaaattgcgtatgaccaaattgcgcgtgagtggaccatcacgatccgttaaggtagattgagagagaatagagtcttatattggagcgatattgattgagcacaacaaattcccaagcaagtgcagataatgatcagcttttgccagcacacccccggaacttttgcaagctgttgatcagttgaaagcttattcgttacgttatgaagttgcgatgaagctcgttttagataagttagattatattagtcgagagtatgagcttcgttacggctacgcattaattgatagcaagcagtcccggatcaagtcgcctgagagcattgttggtaagatgcaacgtaagcatttaccgttaacgttaaatgcggtgtttaataatttgcatgatattgcgggtatccggttgattgttcgtttcctaagcgatgtcaagacagtcgagaatttattggcgactcaggctgacattaaagtattacgagtgaaggattatattcatcatcctaaagctaatggctatcagagtttgcatttaatcctcggggtgccagtctacactgttgatgggccgagcatcattgaggtcgaactacaagtacggacgattgccatgaacttttgggcgtcgttggagcatgaattaaattataagaagaacgttccgcatcaggacgcattgcgagcgtcattgactaagaaggcgcagttaattacggagctggatcaggaaatggacgatatcaagcaacggatgtatgaacctaagacgcccccaaaagaagtctaaaaaatgcccgattattagcaggtaattgctaataatcgggcattttggggttttcttgacgcgaatcaagtccatccatgcacatgactggtatcttatatagaagaaagtaattaagaagttagattgcttttgcaattaaagggttcatgttacttttaatatgcaagataatttccaagacatattgataataattaatttaatgggaatagctagattaattaaactaacaatcgaatagtggggttaaattcagtgttcagccaaatttttgactggttttcctcggtaccaccagtcgttgataaaactggccagttcttccggtgattcatgtagtcctgtttttaaccaataacggacaacaccaacgataccattgagataatactcaaacatgtactctttttcgcgattgccaataccagtgatctcagcttggttatgtgctaagatctcacgcttagttgttgcgataaagctcatcagaaaatcctggtcggttgttaagatgaaggaagtaacggcgtggcgtttcttaaccacctcaaaaattcccgtcagaatggcttgtaaagagtcgggattaagatgtttatcaataacagctagcagttcttccgtggcatcttgttccatcttctgcatgcaatctttgacgtcttcataatgggcgtaaaaggtgccccggttgatatctgcggccttgcagacagcagtgaccgtaatctcatctagcgactgatgttggagtaagttgattagactatcttgaattaggcgttcggtcatttgcgaacgacggttgtttttagtacctaccactgaagttcacctcattatttgaacaatatactattgtttgtttatttaatgacgattttatgaaaattgttggttgaaattacaccggttttcatttaacatgttgttattatttaaacacattgttgattaaatgtcacgatgtcgttttaagaatctgaattagggaagggatataacgtgaaagggagccgtagacgttttacaatccaagcgattgtttggctagttgtgatggtagcggccatcatcttcctgccaaatatcagcagtctggtacgtgataagggccagaccaagttgccaagtagtgccaagagtcaagtcgcacaagtcattcagaatcattgggggcgtaatcaaaataatacgcgccaagtggtggtggtcttcaataatggtgattcaccgttaacgagtgaccagaagcaagcaatcgatgggacgattcaacgcttcaaagtgcagaaatcaaaatatcacgtgaaatcaatgacggctgccagtgataatgctgctgccaaaaagcaattgatttcaaaagacaaatccacccaattactacaattaatggttggtaagaatcagaccgtcgcgaacatgaccaagaatattacggctggtgccaaaacggctggggttaagacgtacgtgacagggagtgacatcttaaatgatgacttcactcaggaaacggaagctgggattcagaagactgaaattattaccgttattttcattttcatcgtgttaacgttagtcttccgctcgccgattacgccgttagtttcactgttgtcagttggggtgtcgttcattatctcgctgagcgttgtgatgaatctcgttaataaatttaactttccattgtcgaactttacccaagtctttatggtcgtggtcttgttcgggattgggaccgactacaatattctactgttcgatcaattcaaagaagaactcagtcatggcgatagtccggtcgccgcgactgggcgcgcgttaaagattgccggacgaacgatcctatacagtggatcgtcactattgattgggtttagtgccctcgggttagcgaacttctcaatttacaagtcagcggttggggttgccattgcggttgctatcctattgctcgtcttgttaacgttgaacccattcttcatggcgttattaggaccacggttattctggccaacgaagaagtttgctggtggtagtacgagcaagatgtggcacggcattgcagcgtcatcagttcgttacccaatcatcgccctagtcgttgttttgggtgtctcattaccgtttatcctaacgtacaataatgaattaaactacgatacgttagctgaattaaacgacacgattcctgcgaagaaagggttccaagttgttcaggatcacttctccaaggggacggctgaaccgtcaacgttatatatcaagacggatcatgccttcaacaatgaaaaagatctaaaagtcattgacagcttaacgaagcagttacaaaaagttaagggtgttaaaaccgtggcgtctgtcacccaacccggtggctcacaaatcgatcaattatacgttggcaaccaattaggcaccgtcactagtgggatgaagtctgctagcaaggggttgactaagattggtagtgggttagatagcgccaatagtaagttgaagagtgccaatatgtcggatagcgcgaagtcggccaagaagttggcggatggggcggatgaagtttcatcaggactcaatactttaaatggtaagactggaaccctttcaagtggggctggtcagttggcaagtggttcgagctcgttagcgagtggattagttacttatactaatggtgtctacacggtcaataatggtttgaaccagttgaacagtaagactggaacgttggctagtggagttaatcagttgttaagcggcacacagagcttgtcaaatggacttgatacgttaaataataataaaacaactatttctcaaggaactgcaagcttaacctctagcgtagcacaattgcaaagtggttcgagtcaactttcaaccaagctagctgaactggaagcaaaagtgaaagctggaagcacggacgttaatgcgtcacaattgcagacattgattgatggactcaatacactcaatacaaagatggagacagttgctaacagttctggcaaagttaagtctggaattgcattgttacaagacagtgctaagaatgctaattctgcgcaaactaaaatgactaatgatatgacgactgttcaaagtgcgctggaaagtgcggctaaaactgatgctgctaatgcagccggtacatcgtccagttcaacggcaactgtgaatgctgatacggtcgcttctgcagcggttgctgctgcaggttcaagtgtgactgatgaccagaaggctgctattagttcggcagtaacttcggccgtgaacgcgcaaaacagttcgaacgctagtgcaagtacttcggcgacaaaggcaacaacgacgaccacgtcgggtgcaaaagccgggctggaagcattgtctgatttgagtgcgcaactcaagacaattgcggatctcaacaaccagttacaaacagcgagttctcaattgagtggcttgtcaggccttggtgacttggcaacggcaagtatttcagcaaataataattcaatcacagcaattaagggattacaaacggcggttacagaaatgcagacgcttgaaactgcgactgaacaattgtcagcaggctctgaccaactcacttcaaagctcggtcagttgctaagtggtaccaatacacttgcgtcaaaactggatacttacacaggtggtgtgactaagcttgcttctggggcaaacacggttaataatggaatgagcagtttaagcgcgcaaattccaacgctaacgagtgccatcagtgcgcttgattctgggactaaccaattagctgccaactcttcaacgttaaatagtggtgcttcacaattagctagtgggactgcaagtttgaactcgcaagtaccaaccttggtaagtggtgtaagtaagcttaacagtggtgcctcgcaagtggcctctggtaatgaacaaatgtacaccagtattcaaagcttagtaggtcagatgcagacgctccaagatggtttgaagactgccagcgacggaactaagacaatcaacactggtgttggctcagctaacagttacttgactggcttaaaggattccgcggctgcgaagacgtattacgtgccaaagagcactttgaagggtaagacttacaagtctgctttgaaggcttatatgtctggtaacaaccacgcaacgaagttaacaatcgtcttgaatgaaaatccaagttcgaagtcagcgatggataaagtaacggcaattcaaaagcaagcgacgaatagcttgaagggaactgcgttagatggtgccaccattgcgattggtggtcaaacgtctgaaacgaacgatacccaagcaattgcttctagtgacttcgttcggaccgctgcaattatgttggtcggaatcctaattgccttgatggttatcacgcgttctgtcttacaaccgttctacatcttagggactttgttattggcttacattatgtccttgagtattacacggatcttgagcaactggttcttgggtcaaagcatgttaacttggaacacaccgttcttcgggttcatcatgttgattgcgcttggggtcgactacagtatcttcttgatgatgaagtatcgtgaatttgataattcggctgcgacaccaagtactcgaattgtcagagcttccgccgtcattggagccgtggtcttatccgctgccttgatcttgagtgggacgttcgccgccttgatgccatccggtgtcttgacgttgattcaagtggcgatggttgtgattatcgggttgattatcctggtattcgccatcccaacgattattccaagtttgattcgcttaacttatccgttgacggatcgtatggaagacgaaaccactgctgaaaagcagacgaaacgaaatcggcaataaaataagtcagttatgcgataataagtgtaaccaactggcgccgtctaacgattcaagttggacggcgctttttttaggggctgcacttagattttaaaaacagtgttagttttagtctaagagtatgcggcgagtatgagatagccggattggatagtggcgataaggagatgtttttaatgcaacgatgtgcatgggcggattcatcaccagcaatgcaagcgtatcatgacaacgaatgggggcggccgcaacataatcagcaacgactttttgaactgttgtgcttggagacttatcaagcaggactgagctggcagaccgtcctgaataagcgggcggcttttaatgaagattttgcggattacgatgttgaccaggtggccgctatgacgaccgccgatgttgagcgactactaaccgatgctcgaattattcggcatcgtcagaagttaatggcaacgatcaacaatgctcgtgtgattcgagattggccggccggggaagactttgccacttggttatgggcgtttgttgataaccagcctatacgccaggcgtggccgtcaatcgatgaggttccggtaacaaacgacttggcgcaacaagtgtctaaagagatgaaacgccgcggcttcaagtttgtcgggccgacaaccatttattcttatcttcaagcgactggtctcattaatgatcatgtggcggactgcccatttgctccagaaaatttaccggcctaacgcgcttaattcccggcgcggtgagtaagtgagccgtcaatttaaaaccagcgcgatgacaactgtcaggcgctggtttttattaaaatcaatatgttttggtataagtgtgattgcttaaattttatgtataaataaatgcttattataacaataaaaataattgacatgatgtcgcttaatttgctaagatacggcgtaagaatagctgcggaaggcaagtgatgggagcgacgttaggtgaaagaagtaaggttttggggactcttgttaggactgtttgtctgtttaggggcagtgataccgttagttagtaaggctgacgtacttgatacggcacccgctggactgaatctggaaggcttatttgaaccgggaaagtttgaccgtaattcggccacaatgcagactgttttaaagaatggccattcgcagcatgttatcgaattaacaaatgacgataatcaagttggggcaatgtggtcgacccctgttaatcgctttaacatgcgggtcgataaccaagtctcaatgtgggtgaactttggggacaaagccgtgagtgaaggactggccgttgttttacagaatgatccccgcaaaatgagtgcgattagtcggtatggaaagaaaagcattattggtgagaacttgggtgtttatgggacggatacctatacacggcgaacggcgccggccacgattgctaagacggcgattcaaaaaagttgggcgttggagctggataccaaagtgaatgacggtggtttttggggattgtatccccgggggaattctttcgatgaaaagcctaaaaaaatgcatatggccgcgagctaccctgcaagtccggatacttatacgcaacggggtggtttaacgtcctcttatcgttttgaacagaaccatgggagtatcgctgataaattaccactcgcggacggtaactggcaccatcttgtattgaagtgggtcgccagtaaacaaatcatgagttataccctggatcagggaccaacacgaatgaccacaattgatacaacagtctttggaaaggatatccggaatgttacttggggattaactagtacggcgacaaccgctaatgccagaacactggtcgtctttgaccggttgccacaaccgattgaaatcgagtcagatttaaacgtaaccaatctgactcaagagcgaactgtccatgaaggagactgggttcatggtggggatgagttggaatatgagtacgttctgagctatctcaatggtgacaatgaatggcaacaggttaaggccagcctaccattacccgaacaagttcactttagtcacgcgaagatccgctatgcggatggtaccgaggaagagatcaatttaccagcggacgataacgaatcgtcggtggcccgcttacaacacgatttgcagcggacactatcaatgaaaaatccgcacgcttatattacgctgattggtgaggctgccaaggtcgatcgggatacttttgttgatgatgacatgagttactttgagggtcacgagatgaagaccgcaacggccacaccgcacttcaccattacgaccaataagaccgttaacctgacaattgaaccgttgacacaagtgaagaaaggcgatcccgtcatcattaagggccaaattaagctaaatgatgggttagactttgacaatgatggcatgcgtatcgagtaccgggtcaatggtgaagcgggagaagactatcagttgagcatggacgatccggttggttatgtcgaatttgaagtggatgccgaagaactacaaatcggtgaaaatcagattacgttacgggctcatagcaaagataacgcctactcagaaccagtgacagtaacggtcacggtcattggtggggagttacagctgaaaaaagtcagtactgaaagtgtgtttgcaccaatcaagctgacgggaacggctcaagtcagtcggcccgagggacttgaagtagttgtcaatgatgatacgggctcgaaagctgcttggcgcttagaggcgaccgcgacccctctcgtgactaatcagggccgcacactagcgggaaacttgtattatcaggatggtgccaagctgacaatgttgggaaaggatgccgtggaaatcgcgcgccaaaagacggccccggggatcgactatgacgtgaccgcccactggtcatcgcaacaaggtttggtgctcaaaacaacgcccgccgctgttcctggaagttatcagggtacgatcacgtggcacttaagtaccgtaccggaagagtgagtttacgattgtgtaagtaattcgtttaatcaataagttcaatagtcgcgacaagaattaattgctaattcttgtcgcgactatttggcgttcagcgaaagtgctgactaacgcatttaaacgggcctccgatacggtgcaatgctagtagtagcaagcacaaccagcctttcaggggcttagctagcaaattgaaaaatcttcggtttcagacccataaataaacccagcaagttcacaaattagtcagatttcccgtgtaggttaaaagcagtgcaaagcaattgtcataccaatactttatctgaaggagggtttaagcgtgaatttttttaaacgcgcatggctcaatctaacggcaaaaaaggccgttcaattctattagtacttgttacatcagcaatcatgctgtttgtattggccgggttattgattaggaatgctgccgatacggcaactagtaatgccaagaaaagtgtcggggcgaccgtcactttatctgctaaccgggaggcggcttttaagaagatgcgcagcgccacgtcgacgagtaaaagtagtcggcctaagttgacgacatcgcccgttaaactgagtgatgcgaagaaaatcgccaagcttagcaacgtttcaagttacaatgcgaccgtctcaacttccgctaatgcgaagggctttgatacgatttcaacatcaggtagtagtactggtggtgggatgaaaggtatgggtggctcaagtagcagtggtactggtgatatctcgattactggggtcactaatacgagcagcgtctcaacctttgaaagtagctcaagtaaaattacgaagggccgcggtattacagctagtgatgaaggcactaacaacgttgtcatcgaaagtgaattggctaaggaagatagcctgagcgtcggtgatacgattaagttaaaagcaacgaccggtgataagaagacttacacgatgaagatcgttgggatctataaagcgtcgtctagtgcaagtacgcaacaaggtcctgtggtagtaccgatgtcagcaacagtgtttacacgtcatacacgttcgctaacacggtcaagggttctaagtacaagaacacagctgattctgtgacttttgcaatctcagaccccgctaaagttagcagcgtcaaaacgtctggtaaacagttgatcaatacatcgaagtattcgttgtcaacggatgatagcagttaccaaacggttaagagttcgatgaataacgttaaatcatttgcggataagattgtctggctcgttgcgattgctggaacgattatcttagctttaatcgttatcttgatgattcgtgaacgccgctatgaaattggtgtcttgttatcattaggtgagagccgttggaagattgtcgctcaattctttgctgaaatggtgatggtcttgatcgtctcagttgtcttagccggattcggtggtaagtttgttggtaataagctgggtgaccagttagtttcacaacaaacgacgactgcaacgactacgacgagttcaactagtcagcagggtcagcctggtggcggtgggggcgcccctagtgataacactggtggtagcaagccaagcggcaatatgcctagtggcggcggtcagactggtaatgccagtgccacgaccgacacgaacttagatattaatgtcacggtaatggatttagttgaactcggcggctttggcttagccatcatgttcctgtcgattatgctggcttctggtggcatactacgactacagccgaagaaagttttaattgattaggaggggcggcaatgttaaaagtaaatgatcttggttactggtatgaccgccaagaaaatagtctatttgagaatgtaaaccttgaatttaagtcggggacttcgtatgccattgttggtcaaagtggttccggtaagacgaccttcctctcactgctggcgggtctagataaaccgcgggctgggcaaattgaactcaatggtgaaccaatcaataagattggtctgacgaactatcggaagtccaaagtggcaatcgtttttcaatcatataatttgttgacgtatatgtcaccattgaataatctgatgactgccatggcaattacgaactcggaacaccgtggtgacaaggattatgcgatgaagatgttacgacggttaggtattacagatgatcagatgaagaagaatgttcaacgcttatctggtggtcagcagcaacgggtggcgattgcatggaccatggtgtgcgatgctaaactagtggttgcggatgaaccaaccggtaatttggatgaagaaaatacgaaatatgtgattgaccaatttcaaaaaattgcgcatgaacaaaagaagtgcgtcattattgtcacgcatgaaccggatgttgcggacgtttgtgaccactcctaccgattagaaaagcacaaatttgtggcggaaacctagggtgctcttacgattgaatcagacgtgagttgacgcgtacaatcgcatttttgtcaagataagtcactaaaaatgagttctcagaatgatttgattctggggactcattttttgattactgtgaattgctaacgagacaacaatcgtttttgagggcgaacttgccagcgaacgataaaggcgatgatgataaacaagacgagatagagcaccgagatgccaatcgcgtaagcaaccggaatactcaacttggccgcggtgtgggtatgcgtggccaaactaacgacgacggatacgtccgataaggcgtgcaagaaaatcggccagactaagttattggttcgtagataaaggccgcaaaaaatcaggccacccgctgcagcataaaagacttgtgggatgacgtagctgagggtcagctggctgcagttaatgagtaggtgggtaagaccaaatagtaaactgtcgatacaaatggctagcatgagtcggtgagggaagcattgtcgtagtagtggcaggagcatgccccgatagatatattcctcagtgatcccgataactagggcgtagccaatatagagaattaacgttggggtccaagcaagatgacataccttgatgaagttgctcgtcattggtagtaataaaataataattcccgggatgagctgcaagcattgtcgtacgagtgattgcgattgccaccactgaatcgatattttaaaccaaaaatgatttaatagcaggaaaataagtaatacaagcaagtcttggaccagcccactgtataaagttggtactggtagccaggcaattaatttaaaaagaattggtactaaaatgaaaatactaatagcggctccccagccgcgtttggttgatgacatcgaaatcccctccagaagttaatgctaactttagtataggtcacattgaaggtgttggttatattaattacggatcgattagttgccggtggtcattatgacagccactggtgattttggcgtagaatcggcagtattaataggataatgaccgcgatttcgatgatttgaaaactagtcgtcgttataccgggcaaattgattggaggttccatcatgctaaagaagtcattgacggtgtgaatcaacaatggccatagtagcgatgttgtctgtgccgtgattaaacataatagtagccccagtacgaacgtaaagcccaattgcaatagggttaaactaagtgtttggtgaccaagattgattagatgggtcaaactgaagaggatactagtgaagactgcagctctacctacacccaatgttgactggctggcctgaaacaacattccgcgaaaaaaggtctcttcgaacaggctgatcaatatggcaacgaataacagggtcagggtgtttgtcagttgttgggcggttgctaacgtatataatccaattagtgcggctacgattaaggttggcatgatgggccggatttgccgacgccaagttgccgataccccaaattttaaggtttgccgtagccagtcacgatttaatatgagtgcaattgctaaaaagaacagctcttcgaccccagttgttaatgaggatgggagttgggttaagcgtggtagctggaaaatcaggccaatcaacaacatactgcctaacatgccaccccatagtgtgatgactaatttggtttcgtggcgcatctcctcagatccttcctcgtattctcgctactaagcatacgccttttaaatgaatctgagcataaaaaaacagcgtaacgacaattaatgtcattacgctgttcgttagtaatcagttattttataaagcccaagcagccatgccttgtgcgttgtataagctaacggcagcgttaacttggtcttcaacagagccactgctgatgtgcatgttttggaataaaccataggcaccagaagtactgttcttgaccgttgagttccagtttgattcacgcgtgatgatcgtgttccaagttgaagctgaaacgccagtccgtgattgcatttggcttaatacgtagctctttaagttactaccagtgtagcttgaagtcgttgaggttgttgaagctgttgatgatgcagctgagctagtagcacttgatgaagcttgactagtggttgcagcagaacttgaagcttggctagcagctgattgcgttgagcttgctgaagaagcagcactcgttgcaacgcttgaagtagcttggctagcagctgaagaagtagcagcagaactagtagcttggctagcaactgattgtgaagaagcactagtagcactggcactcgttgcagttgaagcaactgaagaagtagcttggctagttgctgattgtggtgcagcacttgtagcagcagaagtcgtggttgtagtagtagtaccattgacttcaagcttatcaccaatgaagattaagttaacattagctaacttgtttgccttttcaatggctgaaactgaagtgttgtgagcttgggcaattgctgaaacagtatcgccggccttaacagtataagtatcagcgttggcaaccgttgttgagatagcgaataaagctaatgcagcagttgatgataatacaaggtttttgatcttcataataattaatacactctcctataatttgcgtgtgttcgattatttacatatattttctattggtcgagcagttgatgtctcaaccaatcaacagtgactagtataactagtgagtgttgcagtgcaataatcagaacattacgtttttagggggtgcttgtaatataaggccgtttttgtaatgaattgtaatatttgagccggatttcatgtaaaatagcgctaccaatcccgattaactagctagaaaatcaataacgacaatgattaagcggggaaactaatgatgaaaattagccgctttatccgataaaagtgatcacttttggtcgatttatgaaaagtcaacgaggattatcgataattttaagcacttaactagtgaattttgacgggttaatttgtcgggaagtctgattatagtgacacttaactagtcattttattgcttggagacgtggcactgactaattatttttcggtaaagcagataattgatagaagttgcgcatcgtgtagtcaattgtggttggttaacgaaggcgtcgattaattaagtattactatagtaggtttatgccaaaagtagcccatgacgatcgctactaaaacgttactgggttagtataatggtatgtggttgtcgttgtggactagtcgtcaaactgtcgggggttcgggactgtacttagtcaggaaattagttggattttctccgttaaggttggtgaattgttaaataaaaacatgtggtattttggttgggagagtgggtcgtcgattgggggggacaactagcaggtctggatcgtgtccgtattaaagcggttgccagaataagcatatcgcatatctaaataacgggttgtcagcatgctctaaggcccattataaagtcacttagcaactgagtaactttataatgggtattggtgggggacacacgtgcttcagcacggatttaatagtagaaaaaaagattgcgaatcagaaatgatccgcaatctttgcatttgtttattaatttagagtggcttcttagtaccagccattagcaagccagtgactcttggcgttgctccatgagccataacgtgaagcaacataactgttagcaacacgttcttggttggcagcggagtagtcaccgtttaagtatgaagcacttaattggtacttaccgatgtattgaccgttacgagcagaatatgaaccaccagattctttaccagcaatccaagtcttagcagcactatcagaaccattgttgctatagtttgatgttgaactagacgtttgagtcgtctgagcagcaggtttgctagtttgtgtttgacttgattgggtctggctagcttggctcggttgagcttgagtttgactagtctgagctgatgattgtgtcgtggtcgtttgttgagtcgtctgtgttgaagtcgtggtagtgctatcaccatttacttcaagttgttgaccaactaagatcaagttaacgtcttttaagtggttagcttgttggattgcatcaatcgtcgtgttatgatcagcagcaatggcagaaaccgtgtcaccggctttaacagttaccgtagcagcttgagcggtagcaccaatggcaaagagactagcagtagcggcagcagttgataataaagcattcttaatcttcatttgtaatgtacactcctattttttagtccgaatttggcttggccccgcgaatcttccaagcactcaatggtacctagtataactggcgattgtgacagggaaatagcaggagttttacgaattaccctaattcttgtaataaacggcgtgttttgtaatcttttgtaatataacgcgcggcgcaattgtttctgagcgggtcaatcaaggctgtttacaaatgaagacggtgtctgttggttaacataaccaaatgttgtgattaaagttcgaagcgtgatatcactgggactggcaaccgctgatgtcgtgactaagcttagttaagccaatttacgagttcttttagtggaaatgtaagcgtttgtttgaatgtcagccaacttacttttggtaactcgaaattagtcggcctttaattggaccagccagttgtcggtttgtttattgttaatgagcgattggggtgccgcttgtaggtctttgttaagcttctgaacggtgccactaaagggtgttgacaccagatgcgccccttgatcgtccgtaatcgtgacgagcggatcacctgccacgaggtgctggcccttagttggtaaatcgagttgatgaacgacacccagtttgtgttgtccttggtcacttaaccccagtagaagccggtcatgtgatttggtcttcagccaaacgccgccgtataacatcggagcatgttgctcttcgtaatcatgacgatagaaatggatcatttgtttccaagcagattcttgttttgccatcatttctcctcaattcagtgctagtagtcggtgcatcaattgaaagtggtgcatgattgctaatttcttaattattcctaaccctgggaatttatcaccctcagcgtaggccaatagggtggcaagcgcgggggtgcgattgagtcccgtcaggtgtgcgggtgcccagtcggtgagctttgttaatgcttcaaaaaacttttgcttttgaccacgcatattggcattgctgtccgaaacaaaatgatggatgcgcaggtcaccgttaaccgtaacataaataagatgtaatgcaattgcgcgtgatggcataccgtggtcaaaatagggtcggcccatgagtgagtaatcgccaaaaccatcaaagccaaccggtgtttggtgccagttagcgggggcaaaataggcgtcagttatttcttgatagtccgcaacgtgcgctggggttgccacgggatcagtcaataagaccgcgtgttgtggtaatagttggtgcaaacgcgcttcatcagggattaggacatgaccagcatgctgtaaagtggtcgtatgctgataggccttaagcaacggatagttaggcgcgatgagcaagcttgtttgaccaggagtggttgtcagaaagtcgcgactaaaatcagccgcaagaattgcgcccggccggtaaaatgggtagggacgcagatccggaagtggatggagcttaacggtattaagaccatagacactcacttggggattcgcaataatgctaaatggttgttgggcttcaataaaagtcgtgactgtttgttgtaattctttggagtcacggactggttcaattactgggatgatgtgtgggccaagttggtgttgctcgcacaatgttcttaaggctaacaaatcatacatccgtccacgtagataggggtagtaagtgctcataactggtcacgcagatctggtgccgttagcgcctgatattttagtttgagtgtctgatattcggcattgcgggcatctaattctgtttgtagcgcagtcaccgcgtcattctgggtgtcatcgatgaagcgatcgtacaagttttgttcagaatcataaacgtcgtagccggtgcgggcccgtttgcgtaattctttgaagagttgatcatcagagtagagctgtagtcctttcttcacacgcttggctttatcgacctcacgaaagagcgatgtgataaagtgactgataaggggcgtttgctcgacttgtaagtcttggcgttgggctttcttagcgacagttaggaaaccagacgttcgcaacggttggggtgcgagctctagggcccgctgatcaaaagcacggtagatcaatacaccaatatggtctggaatttccgattgaacttctaggtaaagttgttgcggcaagacaaagtaattgtaatgaccgataaatgaaagtttggcctttgaatgaaaatctgctttggtgactttcaattcgtagcaacgccattcaatctgaccatcggggagttgttgatagcttaatgtatcaacgatccctttatcagcgggcatcgcaacttcttcaaccacgtaggcgccctgttctagacagtactgatagagagtactttcaagttgtttagttaatttagtcttcattaatgagtcacctccatttggtgccaaaagttggcaatcgttgcttcgagctgcgggactgattggatcgtctgatagtactgccaatgtgctggaaataaatctgtgtagcgccgactagcgaagcgttggtctaacaagagaacgattccggtgtccttggcactgcggatcaggcgtccagcagcctgtaagacgttgttcatgcctggcagttggtaagcgtaggcgaatcctaagccgttttgatggtcgtagtagtcacgaatcaagttcgtttcagggttgatacccggcagaccgacactgacgatagcgactccaatcaaacggtcgccacgtaagtcaatgccttcggagaagataccacccagtacgcagaaaccgagtaaggtttgcgagggtgctgactgaaactggttcaaaaaggtctgccgggcagttgcatccatcgtcgaggcttgggcggtagttgccacatcagggtaggcggcttcaaaggcagttttgatctgcaacagatagccatacgacggaaagaacacgaggtagttgccatgtttagccgtcaacatggcgtgcaagctggcaataatccggggcacgttatgttcgcgttcgtgatacgttgtctggacgtactgggtgacgagaatggcctgatgctttggtggaaatggtgatggaagctggtaggccaaactgttggcttcaccgccaagcacccgctggtagtaagccatcggggtcagcgtcgcagaaaataggacagcaccactgccgagctctaatgaccgattaagaaagtcactgggatctaggcagagttccttgatcgttaagtgatgaccgtcaaggacgaagcgcgtctggtagctgccatcatataggtcgccaattttaacaaaggtcagacaggcgaagaaatagtcacggacggcgtcgagcagtgaccccggcttttgttgcgccaaccagtcagtcacaaattcattaaatgttctgagggtgcgtaataatttgtccgggggatcaggtagcacctgttccgttacttggtcatcaatcaaggttttactgatgcgcgtaaaactacgccggactttcttgagttcgcgttgtaagtcgtcacttggctgacttttatcgggcttggctaattttagcaacgcactgattggctggtcactaacggctgcagagtacatatcacgggagcgactaacaaggttgtggacttcatcgataaggaaaaagttgtcgtcatcacgttcgctaaagaatcgttgtaaatagactaatgggtcaaaaagatagttgtagtcacaaataatcacatcacagaagagcgacgtgtcgagtgaaaattcaaacggatcgacagtatgcttgcgagcatactgttcaatcacggaacgggtaatctggtcttcatgggtcaacagatccttgagtgctggtttaagtcggtcgtagtagccaatcatataaggattatcttccggaagtacatcttgttcctcgggaaaccgaatctgatccttggcagttagcgtaatgcttttcagtttgagtccgtcatgactcattagcgtgaccgcttcttcagcaacgtggcgcgtactttgcttagcggtcaggtaaaagaggcgctcaatcacgtcttcgcccattgctttgatagccggaaatagcgttgagatcgttttccccgtcccagttggtgcttcgacaaagaggcgtttttgcaaccgaattgtcttataaacagcgccagccaattcatgttggcccggccgaaaagctggaaacggaaatggcaagtcttcaatagaagcgtttcgttgtcgtcgtaaatcggctcgtaatgtcaaccagtattcatattctgtaattaagtcgtggaagaatgcgtctagttcagcccggtgaaggatttgctgggtcttcgtgattttttcattgatgacttgaaagtaggtcagctgcaacgtgacctgctcaagatcgggatgttcttgcagtaacaggtaaccgtagactttgatctgcccccagtaaagtgtcaacgtgttggtacttaagtcctcgaagacttgatcggatgttttgatttcttcaatcaacgccccatcatcatttaactgaatcccgtctgcccgacccgcgataatgtaatcagtatcgttcatcgtcacaatttttttcaggtaaacttcgctatcatagtcttcaccacgactactctggagctgacgatgaatcttagcaccgttcaatgcagtgttctggctattctttacttcatttaaatcgccttgtcgcaagacgaattctaccaattgtcgaattccaatcctagttgccatcggagcatcccttctgaatttagtcgcttcctattataaaacatctgttcgtgtttgtctgctgttgattgatgatgccgggcggggctctgtgatgtggccttaaatgatggttaagctgcggcagaccaatatttaagacgcgggcttcggcggcttgaatctgggctcgtcgtgttccagcaattggcgaaaatgcctgggagtcaatgtaggacgaactagccagacgggtgcatgctattccgaattttttccagcgaatcttagctggtcacttttgcctttgaaaaactgatacgggttaacaatctggattgaaagctaaataaaaaagcatcgcgataagggcgccgatgcctgttgcgatgtttagattgacgattttgatttagaagaaaatgaatcagactaggaagttaatcgtaccaatggctgtggtgttggcgaatgctcttgcggagactaaaaccgtagctgatgatgccggctgtgataatggtcgctaaaatcgcaagcaaccatgaaccggacgtgctaaagtaggtggcgtaaccaaggctgagactgactaatgtgatgacgggaattagaattctcacaggggctggatgtaagaagacgacaccggctagccacagagccgctgctgtgaccatggcgtcgacactgattggtgaaccaaagctaataccaagagtgatgatagcaagaattgttcccacggtcaggaggaggacagcaaagccgttgctgacggaccaagtaaacgtttttttcatcatgatcgcctcactttctattaactatattataggctaatttcgccttatgaaagaaataatatgccgacaattaagtttgcaatgttatgaaaattgaaagtttgtgaacaaatccttgaaagcgtatccactattagttaaactggcattaggcacacttgatgatggatggaggaaaaatagtcatggcaaaaattttagcaattaacgccggcagttcaactttaaaatggaagcttctcagtgttcccgaagaaacggtaatcgcatcgggaatggttgatcggctgggattgccagattccgttttcacaattaagaaggcggatggtagtaaatattctgaaactaaggatcaaattgatgcaaaagaagccgctgcaatggtcttaacacggctgaagagcgataatattgtgactcatcttagtgaaatcactggggttggtcatcgggttgttgcgggtggcgaagatttcaaagactctgtcgttattacctcgcaaaccttgaaaaaaatcaaagatttatctgagtatgcgccgctacataatccaacgcaggcttattatattgaagtattccgtgatttattaccaaaagcgactcaagtagccgtgtttgacacttcgctgtatgcggatatgcctaaagttaattacctatatagtattccttacgattattatgagaaatttggcgcgcggaagtatggggcacatggcacaagtcatcgttacgttgctaatcggacggcccaactattggggaaaccattggattcgcttaaattagtgacattacatttagggtcgggtgcttcgatcacggcttttgatcatggtaaagccgtcgacacttcaatgggctttacgccgctagctgggattaccatgagtacccgttccggtgatattgatgcctcaattattccattcttgatgcgccatttagggatctctgatgtggaagactttgttgatattttgaatcataagtcagggttacttggtatttcaggtttgtcacctgatatgcgtgatcttgataagacgcaagatacccgtgaacggtcaaaactagcaattgatatttttgttaaccgggttgtgaagtatgtcggcagctatattgctgaaatgaacggaattgatgcccttgtcttcacggctggtgtgggtgaaaactcatggatgatccgcgaacgcgtcactaaagctttaggatactttggcgtgacagtggatgatgaaaagaatcatatgcacggtaaggaacaaattattagcaaagatgacgaaccggtaacggtcatggttgtcccaactaatgaagagttgatgattgtgcgtgacgttgaacggttatctaaagctgaataaatgagtcaattaaaaacgcgtgattcggattgtggtccgagtcacgcgttttgagttttggattctaatcagcatagcgctaagtcagctcttgtccccgcatatgtgccgatgtgatgtgctcagctattggcgttgtcgcgcaggtttagtcattttgatgtggggcgtgtggttgaatagaaaaggggtaccgctcgaagtgaagccgaaatgctggtaaaatctttgtactggcacttgggcttcaatttgaattggcaaatcagcatagtgttcctgtacgacctgttcgatatgggccattaaatcagcgcccaagtgttgtccgcgttggtttttgtccaccacgacccggccgaaggagagatggtcatcttctgtaaagattcgtgcgtatgcaacaatattttgattgacggttttaaagacatgataagcttttaaatcagtatcatcgacttcctgatagatgcgctgttgttcaacaacaaacgttttgacgcgcaattcataaatagcgtataattcagttgttgttagttctgagaatgttttaatcgaccacatggtgatgcctccttagcatagtgctaagtttatcatcaaatgattgcatatgcaataataaaaaggagcttctatgataccaacattaagattgatgggcacgttgtcgcgaatcgtcacgaacgagggtaatcaacgttttgcgaaatacggcctcaataacaatcagtttatttatttaattcgaatttgtgagcagcctggcctattttttagtcaattggctgaccaaatgaagatggatcgaaccacgaattatcgcgccgttcagaacttaataaaaaaaggttacgtgattaagcagacacatccagagaataaaaaggtccggtgtttgtacccaacgagcgctgggcaagcgttgtacccggaattgcatgcttatgagcagtggtgtgcagacttggttggtgagcagttaacgccgggccaacaacaagttttgtttgaaagtctgtcgttagtcacggctaatgtcacccagcatattgagtaagtttaatcactaaactagattaattgtgaacaattaaaatggcgtggcgttttagctgaattttaggcgtgaagagtgtaccatgtagttatcaagttataactggattaatgtgatcaacgcaggttagcacaattgctggacaggcggcattagtcaacaggaataatgaaaggggttaataaatcatggcaacaactttggtgttaggtgggggttacgcagggatgcgagccgtcaagtttttacagaagagtctaccaactgaggatgaaatcattcttgttgatcagacaccgacgcatacggagaagactaatttacacgaagtcgcagcggggacgatcgcacctgatcgaattacttatcagattccagatattatcggtaagcgggtccagttcgttcaagcaacggtcaagagcgttgatattgaacaaaaacaagtgacctttgaagatcatcctgaaatgacctatgactacttagtattagcattgggcttccagtcagaaacatttggggtagctggcgccgatgaaaatgccttgccaatggatgatttggcaacttcacaggctgtttatgaacatttggaagaacggtttaaagcctaccgtaccagtaaggacaaaaatgatttgaagattgcggtctgtggtgctgggttcactggaatcgaattattaggtgaactgacccagacgttaccaagattgcaggcgaagtatcaaacacctgctgctaagttagtttgtttggaacggatgccatcaattttaccgatgtttacgcaggaattgcgggactacgctttgaagtttatggaaaagaataatgtcgaaatgcggttaggtgccgttattgaggccatcaaaccgggtgctgtggtttacagtgacgcggacaagaacgaacatgaatttacggctaacactattatttggacggttggtgtcagtggttcacacgtcattgctgattccggttttgatcagcgccgtaaccgggtcgtagttaagcccgacttatcactggaagggcatcccgaagtattcattgttggggatgtcgctgcagtgatggatcccgaaagcaatcggccatatccaaccacagctcaaattgcactggcagctggcgaacaagctgccaagaatattggcgctttgcgtcataaccaagcaacggcgacgttccactatgaatctagtgggaccgtggcctcattgagcgatcgtgacggtattggtgaaatcttcagtagtaacaaaccggttcatggctacgcggcatcagcattgaagaaaattattactgaccgctcacttttggaaagtgcgcatttaggaacggtcttcagtaaagggcgttttgacttatatcattaatcattaaattaattccagtagtatgataaatagccaccacagaaatcgaatttctgtggtggctattttggactagttaaccgtcgaatggctcagctggttggctgattcgggcaattaagtaaccagctgttgggactaacgatactttacgggcaccccttacaattaaggcatgataagggggcggtcaaaatgacgactaaatcaatacgaacaccaattcaaccgtggtttaccctagtggtagcgggcagcttactgataaccttgttttctaccgcactttggtggttggctagcagtgcgttttgcgcgttactcattttaaacttacaatttatcgtctttccaaccaccgcggatcgttattggctaaatcggctcagtttaggattggtactagtgctagtagtgctcgcgaatattaaatttttaatcattagtggcttgacatggcagtaagcgcctagacattaaaggacctgacttgaagcactctgtttcaagtcaggtccttttgtctaatgatgccagtcatttgaatcaagtaggctgatccgattagtgatgcatcttaaattccaaataacggtcattatacaagccgactttggctggtgataaatcttgatagatttgaagatgcttgattgtgttattgtctgggtaaaattggcgatcgttgcgaatggccttaggtaatagcgccttggctttccgattaggtgtcgcgtaaccgatatattccgcattttgggcggcgttcttgggttcactcataaagttcaagaaggcgtaaatcgccttaaagtgtttggccgttttaggaatgaccaagttatcaaaccacaagttactcccttcggatgggacaacgtaatgcaagtgtgaattgccagccaacatttcactagcctcaccggaccaatcgaccgcgattgcggcttcgttttggatcatgtacattttaatttcatccgctacgacggccttgacgtttggtgatagccggttaagcttgtttcgcgcagccaatagagtggctggatcggtcgtgttcatggactgattcattgatgcgagggcgaaccccattacgtcgcgggcgctatcaatcagcataattttgttatggtattttcgttgccacaaatcattccagtgttgaatactgcccggctgaacgtacttgtcgttataaatgataccaagcgttccccagaaatatgggactgagtaacgattgtgttgatcaaaggccaagttcatgaagcgcggatcgtaattcttcattccagtcagtttacttttattgagcggtaagagtaagtgcgcttttttcattttttcaatcatgtaatcactaggtacggtcagatcgtaactggtgccgccttgcttgattttcgtatacatagcttcgttgctatcgaaagtttcgacgttaacgtgatagccagtctgtttttgaaacttagtgagcagactagggtcaatgtagtcaccccaagtatataggttcaaaacctttttgccagtactaccagagctcgtctgcaagcgttgcgcgccaaaggccagtaagccacagacgactagtaagctaacgataatgcttaataattttttcacttccgccgccccctaactgctggccgccggtgccgactactgtattggttaatgaagtagtagccaattactaacaccagtgccatcaggaacattagaccggacagggcgttgatttccaggttgatgccttgacgggcccgtgagtagatttcaaccgacagcgtgctaaagccgtttccagtcacgaagaaagtgacggcgaagtcatcgagtgagtaggtcagggccatgaagaagccagaaaagatcccgggcatgatgtagggcacgatgatttggctgagtaattgccaattgttggcacctaagtcagccgcggcatccagtaaactggtgctcatttcttgaatttttggtagcaccatcaagaccacgattggaattgaaaaagcaatatggcttaacaagactgagccaaaaccgagcggaattttaagggcagtaaagaaaatcaagaaactggccccgatgatgacgtcgggtgaaaccatcaagatattgttcaacgataacaaagtgttgcgggtaatcggtttggtcgtactattgattccgagtgcccccagcgtgccaatgacagttgctaataatgatgataagagcgcaatcaaaatggtgtcgagaaaaatggcaattaaacggctatccgcgaataagtcttggtaatgttgccaggtaaaaccatgaaagttgttcatagtcgtaccttggctgaaggagtaaacgactagaaaaataattggcgcatacagcacgatgaaaacaagccacaggtataagttgcgccacttgaagttacgtaaggtcattatttcgtcaacccctttcgtgcgcgctttttactgctgccagttagccacatgatgatgaccatcgcaataatcaggacgaccccgatcgtcgaacccatgccccagttcattgtcgtcaagaagtgttcctcaatcgcagtcccgagtgtaatcaccttattgccgccaattaaacgggtcaacatgaagagtgacagtgagggaatgaagacggcttgaatgccagccttcacaccggggagtgtcagtgggaaaattacccgattgaaggtctgccaatttgtggcaccgagatcccgactagcattgacgtaagatgggttcagttcgctaatcgagttgtaaatgggcaggaccatgaacggaatctgaatataggccgcgacaaagatgaagctgaaattagtaaagagcaattgcttgggcccgattccgatgaaacttaaaaactggttggcgatgccggcttgactaaaaatgccgatgaaagcgtacgccttaagtaataagttgatccatgttggcataatgattaagagcagccacagctgcggatgcttcgtttcgttgagtaaataagccgtcggataactgatcaataatgttgcgagtgtgatcaagaaggcgtaccagacagagttgagcgtcatcattaagtaggtatttgatgaaaaatacgtttggtagttgcccagtgtaaattgcccgttaatgttgaagaatgattgatagatcaacaataggactggggcaatgacgaagaggatgatccacaacatgtacgggataaagtaggcggtgttacgacttaatcgttgttttggttgcatgttgacacctcctaatcatcttcgtattgttcaagacgagcatcaaaagcagcttcgctctcgtttaaccgcatgacgtgaatgtcttgtgggtcaaaggtcaggccgatcggttcgccttctgcggcagggttagttgaatgaacgagccattcgttatgatcggtatcgtaagcgacgatttcgaaataattgcctcgaaatagttgggagtcgacagtgacgactaacttgccttgatctgcggccacaatgtcgagatcttcaggccgaagaacgacttcgacaacttcattaggctgcattcccgcatcggcgcattcgaattgtttgccgacaaactctacttcaaaatctttgagcattttacccggaataatgttactttcaccgatgaagttcgccacgaaatggttgatcggttcatcgtaaatatcaactggggacccaccttgtaaaatctcgccagcgttcatgacaaagatttcatcactcatggccaaggcttcttcctgatcgtgggtgacaaagagaaaagtgatgcccaggcgttgttgaaggtcccgcaactcatattgcatatccttacgcagtttggcatcgagagccgataacggttcgtcgagtaagaggaccttaggctgcataacgagtgcccgggcaatggcaactcgttgttgttgtccaccagagatctcactgatttcacgttccccaagatcagctagttggaccattgcgagtgctttttggacccgcgtctcgatttcatccttgggaactttgtgtaatttcaagccaaatgccacgttttccgcgacattcatgtgtggaaaaagggcgtaatcttgaaagactgtgttgacttgccgctgattggccggcagagtgttgatgacctgaccgtcaaagtaaacttgaccggaagtggcatccgtaaaccccgcaatggtacgcagaatggttgttttaccacacccagacggaccgagtaacgtatagaatttgcccgcttcaagatctaagttgatgttttttaaaacttgatgttccccgtaacttttagtgacatttgtcaatcgaatgattggttgtgtattaaccgccaaagtaaagacctccttaaaacgtgtaccaagctagtgtaacctaataccagctcgattggttgtgacatgattataagtaggacgcggtcgtaaccaaggtgaacgtgcaggacgtggtgccaagattacgaatctgatgcgtcttagtcgcatggaagtacagcgtatctcccgccgtggcagtatattgctgagctccgagctgtaagcttaaagtgccggtttgaaccataataaaggtctctgccggcgacggctcaaaagatttgaagcgaccactaggtgccagtgtgacggtgaccggttctaactgattttcgttagacgcgggtacgagccatttcacacggtatcctaaggcttcatcgtcatacgtggtctgatctgctggatggtagaccactttgtgagtgggctgctcagccgcaaaaaaatcagcgggggcacaaccgagtacttcaagaatcgcgaagaacgtctccattgaaggcgatgactgattgtgctctaactgtgatatgtaccccttgctaaggtcagttcgttcgcctaattcttcttgcgtgagttgcttttgaatccgtaagttgcggatgcgttgaccaatgtccatgacattcacctcgaatcggtagttttgttaaactaaacaataagtttagtacgagctttaattataatgaaaaatgacgtggtgacaagcattttttacaattggcagcttcttttttttagtctgccagcttgtctggtcaaatcgcccagaaacagtggtgttgaggggttgaaactgtcgtttggttagtgaataaattaggtgcgttgtggacggacttttcgtggcgtgccgctgaagcctgcgcttgctacgccaacgaatcaatgcaaaaatcgcattaatccgctggctaggcaatgctcagcttcaacccgcggcccctcacactctaataaaaaagcccaagacatccgtcttaggccgttagcgttgttgattaatccgcgcggtaaacgacttcaaaaacttcactgaccatcggtgtgtccgatgagaggtttttgccgtgttcttctaacgtcggggtgaattctgccgtcttacgcttgcgccaatcaccaattgtgcgatcaccatcgccttcatggtaagcgtgttctgccgagatgcgataaaacggaatgagttcagacaccaccgttttcagaatcgcgaccggtttcatgtcaccatttagcaagacgttgtagtcgccaacttgtggaatggcaatttgttccgcggtataactgtccagcggcgtggttgtcgctgtcttcgtcccagccagaattgcgtcggctaaagcagtcacttcggcagggttattttgttgaccgaaccaacgtgtttgataagaagccccgtttgtgtcggtgctttcgttataagcatgccataattgttctgctgattgagcgggcataaaggtcacctaatttcgattagaattattgaattcgaatgcatgtaaccgaattcacaattcaagtatagcatgacatttctgaaaacgacacgttcgacactggtttttcggggaaaattaagttagtcaactattgaccgacatttgctataatatacgtacgaattggagggcgaaaatcaatggaaattacacctgttaaaatgctggatttaccacaaatcatggcgatcgaaaaatctggtttttcagaagcagaggctggcagcgaggctgcttatcgcgaacgcattgagaaattagcggatacttttctggtcgcccgcgatggtgcagtcgtacttggctttatcgtgggaccagctgtcggtgcccgctatattgaagatgagatgtttgtagagacaccgactaacttaccacgtggcggccatcagctggttttcacgttggcagtttcgccactagcacgtcaccaacagatcggtagtcaattattgaccgcgctagctgagaaggctcaagcagacgggcggacaagcatggcgttgacttgtttggaacgactaattccgttttatgaacgtaatggttttattaatcaaggtgtggcgaactccgaacatgctggtgaaacttggtataatttagagaaagtctgggattgaatcatgaaattagcaacattacaagcacaattaccggattttgagatccgattactaactttagctgaccaggaagcattgctagagctggaacaaagtaatccgcgctatcatcaatatttctcaccggaaccactaacgatgactgaggtacaacatgatttgacggcccacccggacgagttagcggcggcacaaaaacaggtttttggtttttacttagcacaccgtttagtagccgttttagatgtactcaatcagtatccacaagaacaatttttattcgttggattactcatggtcaataaggcttaccaacgtaaatcagtgggccgagttattgtaaccggactgatgcaagcggcacttcaagcgaatataacggcgatccaactaacgcgcgttactgctgatgaaggggtcgcaagcttctggcagaaactcggttttgaagctggtaaccagctgttcttacctttaaaagccggtggtcggttagcggtgacgacgatgacacggctactccaatagaattctcatggaactcttagcaataaggcctagtaagcgatatcagacatgttaaactcgtgatgactaataaatagaaatgaggttaacacgatgattaagcattggggaaaggccgaaactggcatgttgattgcagccgtattgttattaatggtaatttttaccttttttgaaattacggctagtttaacagttagtgtcattgcttttccgattagtttgattgtgttgatggcgattatggaattcgccgcaacggaattacggcgcaagtaagtgactcgcagatagatcgtaacctaatatcgtgcttgtttagcaggagcatgtatatatagaagcccgtatttaccacgattggcagatacgggcttttttcgtgacggctgaggactattcctactaggtctaaaggacactgtttggactgtacaagtggcctgattttaacgttttcttagcttgtttataactgtactatactgtactatttaacgtaagcgaagtaacgactgtgtattaaatggaggtgggccatgcaaattgatcatggaagccgacaaccgtattacgctcagatagtaaccggtattgaacaagatattgctcatggtgtgttacaaagtggtgaacaactgccgtcggtgcgtgaaatggctcgtcaacacttgctgaatccgaatacggtcagtaaagcctataagcgactggagacacagcaaattatcgagacggttccgggaaaaggcacgtacgttaaagtggtggattcaacgctgttccgacaagaattacgggaacagtttacacaaattgtcaggctagcgggtcaaagaggcgtcagtattgctgaattgcatggctggcttgatcaaatgggggaaaaataatgagtttagtgattaatcagttaagtaagcgcattgaccatcaccagacgttagatggcattagttttgagattggacttggtcaaatcgtcggtgttgttggccgtaacggggttgggaaaacaaccctttttcggacaatcaatgggcagtacctcacggatcatggtcaggtcctggttgatgggcaagaggttgttgatcaaccggaaatgcggacgcaactgtgttttattgatccactggcaaatttttttaaaggcgcgacgattgtgcaaatccagtggtattatcaagctgcttacccggactttgataatgccgaatttgcgcaattgttagaccgttatcatctgacgtccaaacaaaaattacgccatttctctaagggaatgtttggtttgtttacaatcattctcagtgttgcgacgcaagcgccgtatctctttttggatgagccgctagatggtttggatgtcctaattcgaaaaaacattcttggtattctaattgatgaagtggctacgggaaaccgttcaatcgtgattgcgtcacataatttggctgaattagagggggttattgaccgcgcgttgatgcttaaacacggtcgcattgtcaatgactatcaattagaagccatgcgacgaagtgcacgaaaagttcaattagtgtatcgtgacaagcagattccagccgttgttaaacaattaggccatattgtacacgtttctggtcgggttatcgtggtagtgtttgaagattataatgctgaggtccaggcgcaattagcgacaactaacccggtatttcaagaagatttaccactctcattagcagacttgtttatggctaatctgacggatgaagctgactttgaattattatcttagggggacgataaaatgacgaaacgaaagttatggcagttgttatggcgccactatcgcacgttgttattaacggcgggcggtgtcttactactagtaggcataaaggaaggctacagtattgcccataatccgtcacggtatgttgcacaaaatgtcagtagttttgcgttgatggaagccactcatcttcggatggaaacggtggtcgccatcatcgttagtctggtgctaggagtcgcactattcttaagcgataatttcacgaattttaatcaatatttatttagtttgccggtcgctcgaaagcaaatttatcggcgtaagatcgggttacttattgggatgttggtcagcgcatacatgttggcggaagctgtttttggactgattgcttggcgcgtgttggctaaacagcaggtgcggattgattggcttacgacattgtatgaagaacttggaatcctggcagtaatgttagtgtttggattattagccgctacgttcgggttatgggttggccatatctttgcgagtgcgcttgcgacatttgtcttcgtttgtagcttgctctttgcatatgatggcttgatcaatcttgctgcaggattaacgaagcttaaatatgagcaggtggatgttttaggtcagctgccgagctggaaacccgggggcttactaaccacttgggtgatttgtggtgttatcggtggcggcctgtatttgcttaaccgctgggcgtttgagcatttatctttggaaaatagtggggattttttccgctttccgcagtggcgcggagccgtcctgggcttttcaattatttatctaattgttgcaatttgctgttcacaatttggtaatggtgttttagggttgctaacggataactatcatgcgcatatgccattatcgactgggattataatggcgctggtcgttgcctatctaacttggagtttggggcggtggtttctgtaccgaccggatcgttttcgcgatgcgtggacggttaagaagttggcttaacttggtcataaatctaaaatgcgcccgttgaagttaagcagactgacttcagcgggcgcatttgttagcggcaattttaaatttattatcctgattgatgaaactttagcgaatcttagttaagcgttttgcaacggtcttaatatttagtagatcccaatcttccaagttgtgtgaaatcgagttatgcccccatgttccacaaccgagtgttaaggatggtgcgacgttatcatatttataaccaatggcaccttgtgaagacggcacgttgatcaatgctcgacaagcagtcatttctaaggcaaacttgttcataacagcttcgtcggtcgtatgcaaggcggccgtatgtcccagtccgccaagtgctaggctgcgtttcatcaggttgaagccggcctcagtatccttggcatgaacgacggcgaggactggtgataacttttctcgtgataagacttggtcaccaccgatgctaggcaattcaactgctaatactttggtatcggatgggacatcaaagccagcccactgagcgatttgccatggcgtttgcccagctactttcgggtcaacagcctgtttatccaggttcatgacagttgcttctaaggccttgaagttctcggtaccgacaaagtacacaccgttgtgacttaattcacgtttaacttgatcatagatctgatcagcaacgattaagtttgattcggaagcacagatcatgccgttgtcgaatgacttggaagtgacgacatcactgactgcctgttgaatgtctgcggtttgctcgatgaagcatggcacgttaccagggccaacaccgagtgccggtttaccagttgaatacgcggtcttgaccatgccggcaccgccagttgcaataatggtagcgacgcccggatggttcatcaaggtgttggttgcttcaaggctaggcgtcttgatccactgaatccaatccttaggagcgccagcggcaatagcagcatcgcagatgattcggccagtttcaacacaagatttttgtgcaaagggatggaaaccaaaaataatgggattgcgagtctttaatgctaacatggcattgaaaatgacggttgatgttgggttggtaactggggtgacccccgcaataattccaactggttcagcaactttcatcacgccactgactggatcgtcattaatgataccgaccgtcttgtcatccttgatgtagttataaacgtttttggctgcaaagtcgttcttcgcaactttatcacgataatttccgcgacccgtttcttcgacggccatagcggccagcatgccacgagcagcgtgggcagcgcgggccatggcagcgacagcctgatcaacttgactttggtccatgacttcaagacggttggcagctaacgaagcatttaagactaaccgatcgattgaacgtgatacggttgtttcttccatttctttcagcattcacggttcctcctatgcaaaatcaacttgtttcttatttcacaatcactattataaatactttttcacaaatgtaaatagctaatatttaatttcataaattgcttttaaaacactataattattgatttaatagcgtatataaatgtaaataaactgttcgcttacattttcaccgaacggattgctgttataatattcacaattaattattgattaaattcaaagcaacttttggcttgatctgtaactgattttatataaatggaagggtttacaaacgggcggttgtcaaataagcaagaattgacggggaatcgttggttaataaatatgacaaatcggttatcactcctatgtaaaatgtgctaaaatgaatgtgattcaaaaatcgtatctcttaattaacctaggagggttattttatgtcatttgtaaatgctgttgatatgacacaagacgcatacaagaaccattatgctattggtgcgttcaacacaaacaaccttgaatggactcgttgcatcttgaagggtgctcaagacactaacaccccagttattatccaagtttcaatgggtgctgctaagtacatgggcggctacaagctcgttatggacttagttgctgatgaaatggaaagcatgaacatcactgttcctgttgttatgcacttagaccacggtaactacgaagctgccaaggaatgtatcgaagttggttactcatcagttatgtttgatggccatgacctaccatttgccgaaaacttagaaaagactaaggaaatcgtcaaattagctcatgctaagggcatctctgttgaagccgaagttggttcaattggtggtgaagaagacggtatcatcggtgaaggtgaattagctgatgttgaagaagctaagactttagctgctactggtatcgacatcttagccgctgggattggtaacatccacggcaagtacccagaaaactggactggcttacacttcgatcgtcttcaagaaatctcagaagccgttaagatgccattggtacttcacggtggttctggtattcctaaggaccaaatcgttaaggctgttgaattgggtattagcaaggttaacgttaacaccgaaaaccaagttgcttttgccaatgcaactcgtgcttacatcgaatctggcgcagaccaaatcggtaagggctacgaccctcgtaagttattggcacctggtaagaaggccatcgttgatgttgttacatcacggattggctggttcaagactccagctgttaaataattggatttttgattcagaaaaagtcgactcctcggggtcggcttttttcctgcgcttttttggagaacttgggactgacttaccacctgggagtgccagtgttagtgtgcccttttccggttgctattatcggggaaccgattatagcgtgatttttaattttgcggtttgttaaaataatcgtaacttaatgggatgctgttggtatccaattgaatgaaggaaaaagtgaggtcagtgattctcgaatgccgagggtcactgacctcattttggtgttaagaacggataactaaacattaatcgcgtcttgcaattgctgctcattgtaaaaaattaatacgataaacatcaccacgtaaagtaataatggtaaccacgcatagttcagggtaatcatatgctgagtggcgatattttgcgcatgattggccgtgtagccgcttagatgaaagagtccggcggtgactaggccaccaagtcctaagccgacattgacgccgaagtcatcagtagaggctaaaataccttctgcttgaatgccaagcgccgtgccataacggatcgtatcagcaatcataattgagaccaaaccaatgatgagaccgttaccgacagcgttgatcaacgtaccaccgaagacgaaggccagttgattgatggctgtcccgagaccgaggatcagttgtcccacagcggcgattgcgatacccgccaacatggtattctttttcccgtggtggttggctaagcggacaatcaaaatgacaccaatcagtgacgcaaacgtaaagccgttaacgactggcactaagtcctcacgctgaatcaagtatttaaagtagtagatggtcgtttgattcttgatggcggttgttaaccaatacagtaaaatcacgctggataaaataaaccacggctggttttgcttgagcatgccccacaccgcactgagtgattggtgcggacgctcaggttgactaaagcgttccttgacttggaagaaggtgttgaggatcagtaccaacgaaataatgccaaatagaacgattgtcagtaaaaaccctcgttgctgatcaccctgaccaaataaagcaactagtggcaaggtgaagacagcgacgataatttgaacgctactaccgaagaattggcgaatcacgcctagtaaggttaattcacgttcattctgggagagtgctggtaaaatcgatgtgattggtaggttgacggcggtatagaagaatcctaaccctaaataggtcacataagcccagacgagtttaccagttgctccgaaattcggggtcacaaaggtcaaaacggcgaacaagacgtagggtaacgcgtaccataagaaaaacgggcggcttttaccgaagcacgaatgggtatggtcaatcatgacgccgataatcagactttcaacgacatcggctaagcgcgcaacgacaaataaaatcgccgctgcactcgtggataggccgtaaacatcggtatagaagaataataagtatgtggtcatcatctgaaagactaagttatccgcggcatcactgagcccataactaattcgttccggccaagctgtttgccaaggttgtttcaatattaacacctctaagtatggttttgcacaatctaattctaacctagttgcacgcttaaacctaacggaaaggtttacaaaattgattaggtcttagattgatcagaaaaaagcctgcaggtggcgttcgtcaacctgcaggctgtgcattgtttgtcctgattaaaagctacttagttgttaatttgctgaccttggtgagtgctgggattaagcccaagctatctaacgtttggtttggtaaaacaacggtgttggcattgccgtccgctaaggctttgacagcttccgtgttttggaagataaagtagttttcggatgattgtgccaaggcttcgtttaagatccgcgtccggtaagcatcagcatctgcttcagtttgaacggctgttgctttcgcctttgcactattcactaaagcttcgttttgggctttattggtggctagtaaggcccggttattggcttcattttccagtgtgattgacttactcttaccttcagcagttgcgatggtggcatcccgttcccgcgtagcttgcaggagtttattcatggaagcctgaatatctgccgaagggttaacggaatcaatattgacccggtcaacgtttaaaccgtagcccgccgtaacggaggagatctccttgaagagggcggcattgatttcttgcgtcccattcaggacttcgtttaattctttgttcccaatgataccacgcagtgccgcgcgggtatcttgaatcatactacgaacggagtcttcgtttttaaaaacgaagtcttcaatattagtgacgtggtacttaagcgaaatcttaactgagatttcagcgttatctttggtgataacgacttgttgattaagatcaacgggtgtctgagccgtgttaacggtgatgacacgtgagatgaacggtttaataaagtgaaagccggaactaatgacgcgctcgaactttccaaatgttaagacgacaccttggttcggttgggtgatgatgcggatggaagcgattaggactaaaacgaccagtagaatgacaataattgcaacgatgatacctaccataataatttccccctattgttgtggtgcgataatcgttaccgttagaccatgagcactgacggccgtgatttcaacggtatcgccggtgtgcaatggtgttgcggcgtgcaaatggtacaagatgccatagaatgcgacgccgtcagttagatcggtcggtttgataatgaagcgctgaccgattaagcgctgatctaagtatccctcttgcatagatgacccacctttaatgtgataataattaaattatatgctgtttttggttagattgatagggccgttataaaatagtgggtgagttttggattgttgataaagtatggcgataaatggtgaattcatgctgcatatcgctcagtaactatttggataagctcgttttagagggcggttcagtaatacggagttaaaggagcgcttgaagtatttaagccgacaaaaaaccttcgtacgggaatacgaaggtcaaaaggagtaggtcagcatatgacggggaatcatatgctgataacttgatgagcgtttattcatataagcggggggacgttcacatgccgctcatcaagctgtcaaagttgttacgctttgacggatttcattactttggaggagtaaatgaaaagaatgttaattattatagtagcaatcttggagggggatccttaattgctatagatacatattaacaacgaattgtgaagaaaatgtgacgatgatttttcaaatttaagaattattgattagattacgaaaagatttatgactattgataaatttatcggcaattaaaattgcgtaagaattatctgtcagcgctttcgcaatggtggctttttaaattagagcgtgtatcattaataatgatcacggaaattaaagacaggagatgcttgcatgtacgaacaagcttgtaccacaattttagttgggaagaaggcgaccgttgatggttcaacgatgattgcccgcaatgatgatacgtttatgccgattacaccgcaaaaatttatcgtccatcccgccgttcatggtcgcaacgaaacgttaacttctgggaagaatgggtttaccgcaccacttccagcagatggctaccgttaccaagctgtcccgaacattgaagtcgccgaaaagggtgtttttgaagaaaatggctttaacgaaaaaaacgttggtgtttcttcaactgaaagtgtttatggtaatgaacatacgctgacttttgatcccttcgtgccgaatggtctcgcagaagattcattgccaaccatgctcacgccgttcattgattctgcccgtggtggggttgaatacttgggccagttgatcgctaaatatggttcgccagaaggtaacggtgttttgttcaatgataaagatgatgtgtggtacatggagatcgtcactggtcaccactgggttgcacaacggattccggatgatgcttacgcggtggctgccaaccaagttgcgattcaatgggttgattttgatgatcccgataactttatgtggtctgatggtattcaagaatttgttgcggaacaccatttgaaccctgacaaggaaggttttaacttccgtcatatcttcggtactgataatgaaaaagaccggcattataatactccccgggtctggtacggccaacgttatttcaatccagagatcgaacaagatccacagtcgagtgagctaccgttcatttgtcacgcagccaagaagatttcagttgccgacgttgaatttgtactgggttctcattataacgaaacgaagtacgatcccttcttgaatacaccagaagctaaaaagtttcggccaatttcaatgaatcggacgcagaattcacacgttatgcaagtgcggaatgacgtaccagcagaacaaagcgcgattatgtggatgacatttggggtaccagcttttgcgccatacctcccattccatgcgaacgtttctgaaactgatcctagttttgcgaacaccccgctaaaacatgatatgaatagtgcttactggctctaccggacactatcaatgattgttgaatcacactatgctgatttcgttcaggatgatattgattatttgaaagaatgtcgaatcgaactgggtcaatttgtggctgcgaccgataaacaagcggcgaagttatctggtgacgagttaacggctttcttgactgaacaagataaagtgatggtcgcaaagatgcgtgataaagcccaagctttgattggtcaattagtcaccaaaggtttaacgctctcgaaactaacctataatgttgatatcaatctttaaactttcgttatgacggtatcagcgtgtataattaagttattaagaggacaaggagctgatggcaaatggatgaaaatgtcttatttaatcctggtgacgcaatttcagaatcgcatgactacaatgaagcgctccgtagtgcggatatttataatgcgcgtcacggacgtaagcgcggactcatgattgcgcggccgctagaacaggatcacggttattcggttttttacgcggatgacttactgacagcagatacgccaagaccagaagcacgtcaatatcacgttgaaaagcgtattccaaaagaatagtgcaatcatcccatgatcagtaacaagggtcatgggattttttattttctaaacagtaacccatgatgttgatattgggttactgttgttttataatagcgtttaaattgattaacaggggtgcgatgatgacgaatcgacagacgattaaacacctgacccagacggcgatggtgaccgctttgattattgtattaggtttctttccggggattccagtgggctttattcccgtcccgattgtgttgcagaatatgggcatctttttagccgccgagttacttggccgcaaatatgggacgatcgcagttggattgttcttaggattagtggcactgggactacccctattatctggggggcgtgggggtgccgcgatttttctcgggccaacgggtggctatctcgttgcttggttgctggcaccaatgctgattggaacgttgatcaaaataactcgggcgatgacaagtggttattggtggctagaagttggcattgtctggttggctggtatcttatttgttgatgtaatcggtgctagttggctagctgttcagtctcatatgactttgacggccgccttgctgtcgaacgtggcctttcttcctggtgacatcattaaagggactttggccgtatttattgcccggcgtgtgcgggccatcgttgattttggattgccagcttagtaaatagctaatgtgattggcaggtcaggaggtcataatgacaactaaagaacaagtcttaacaattttattgcgtcatcatggtgagtggcaatcgggggaccagcttgcccaatcagtcggctgtagtcgtgagagtatttggaaggcaatcaatgctttgagaaagcaaggacaccagattgagagtcgtaaaaaccggggctactgttatctgggaagccgtaatttggatgccaaagccattcaaatctatgggcaacggcaatttacggggccccttgaagtggtcgcccagacgccgtccactcagattctagctaagagctttttaagtcatcatcagccacagtttgccgccttcttcgcggacgaacagacggctggctatggccgtttgggccgggacttctattcaccggccaaaactggactgtattttagcttggttgttcctaatcccacgaatgcattggtcaatgtgggtttactgacaactggtgtcgcggtgagtgtcttgaatgttttacagcaattttatcctaataagaactttgggttgaaatgggtcaatgatatttatcttgatcagcataaggtcgggggcattatcacagaagcaagtttggaattagaatcgacttccgcaacggcctttattgtcggtgtggggctcaatttaacgaccaccgattttccgcgggaattgcaagcccgtgcccaggcggtcgacccgagcataccagtggatcgcaatcggttagcagcggccttattatcagcactagtagcgctatcaaaacgctacgctacggccgactttttgcgagcatatcgggctaaatcactagtgttgggtcaacaagtgacacttcaagtgggcgattccgtggtgaatggggtggctgaagatatcgatgaacatggtggcttagtggtccgcatgttgaccggggagcggcggacatttacgagtggtgaagtgatcagggtagggttaccagtatgactgagtgggtaccagtgatttacggcatcggtttagacgctgccggtcggtgccaacattatcaccttgaaactgatattgcggcattgtggtgtcggcgatgtcaacgctattacgcgtgttaccggtgccatgatacgttgtgccagcatacttttgtggccagcgctccgacggatttagccgtgatgtgtggtgcttgtcgttatcgaatgacggttgatcggtatcatgaggggcaatgcccgcactgtcaccggccatttaacccgcggtgtcggttgcatgaccaggtttactttgaaaagtaaaattgagacgtatttttggtagttttggctgaatttagtgattaatagaaaaacaattaaaaaattgacatattctaattaaaaactcataattaggcttgagagtatggttgattgtaaattagtactgacaaccattgacagaagggaagcactaattttgaaatttgaagagtccaaaattttacagcaattaccaaaacagttctttgcgaatctggtcaaaaaggtcaatgccaaagcggcggccggtgcggatgtgattaatttaggtcaaggcaatcctgaccaacccacccctgagtttgttgttaaagcaatgcagactgcaactgccaatcccgcggatcacaagtattcgttgtttcgaggtttgccgcgattcaaacaagccgcggctgatttttacgaacgcgagtacggtgtgaaattagacccggagactgagattgccgtattgggtggcagtaagattgggttggtcgagttaccctttgccttactaaatccgggcgatacaatgatcttacctgaccccggttacccagactatttatctggtattacgttggcacaggtgaagttggctttactacggttaacagcggacaatcatttcttaccggattatcagcaggttgatccacaagtggctgcggcggccaagctgttgtacctgaattacccgaataatcccactggtgctgttgcaacgtcgcagttttttcaagacacggtggattttgcaaatgaacatcagattggtatcgttcatgactttgcttatggtgcaattgggttcgatggtcagcgaccagtgagcttcctacagacatcgggggctaaagacgttggaattgagatgtacacgttatctaagtcctttaacatggcaggttggcgcgttggttttgccgctggtaatgctgacatgattgaagccttaaatttgattcaggatcatctgtttgttagcgtctttccggccattcaagatgcagcgattgcagccttgaacagtgaccaacagacggtccacgaactggttgggctgtatgaacgacgccgtaatcagttctttacggcggcccgcaagattgggtgggagccctacccatcagggggctcattttacgcttggatgccagtccctgaagggtataccagtgaagcatttgccgatttgctgttggataaagcggcggttgcggtggcgccaggaaatggctttggcgcgggtggcgaaggctatgtgcgcgttggactcttgattgatgaaccccgcttcacggaagcctgtcagcgaattgcaaaactgcacttattcgatcgttaggatgacctcttagcattaatgatgacagtcagtcacttgcttagcataattcatgcaacgggggcgcaactcgttcttgattgctcggaaatattgagctgtaataacggtatcaaaataacgcaactggcatgtgaatgccagttgcgttattttgattcgaggtattgaattattataaattaccggtgctctttaaccgcttctctaacaggtacgcgtccatgtacccaaaggataattcaacgacctgatcgagttcgatcatcgtgccaacatgattaatttgattatcatcatccacgttatagaagatgaagtgcccgttcgttaacgttcccggatagccagtcattgctggcaacatggggttttctgtcgtgatgtgaacgaggttattgaaagttgcggcttgtcgcaaaattgaatcaaaaagatcagttgtggcgtcaaataaccgttcgtcgtttaagacgggttgaacatttaactcatactggcgatttaattcaataaagccacgcatcgtttgtaaatagtcggactgggttgtcaccgattcaattagtgaacggcgacaaagagtgtagcccccaaattggcccgtcatatcgatcagattgagcaggacactatcagcgttcaatgcgttaatgaagccaacaaagaacatgtcagacccgtctgctgaccgaattgcaatcagttggtgctcatttaaggcgttgtttaaagtatgatcaacgtcgtcaaactcgctaactttgatggttgctcgatgcgtatggatggtcttgacaaaggcgctttccaataagagctcattgccgcagaactctaagatctgaatagcagccaatggaatttcctgttgcccgttgtttttaaagttaaatttgtcaaaagttttaaaggtaatcgtttggtcagtgacttgttggacctgaccttctaaataattttcgttgtcttcgaggactagtagcacaacttgatgatcggtttgggcttgggtgactaactgtgttaggactggccgttgatcgtctaaagctacggttggttgtggcacactgttcaaaccttcagtagttgcattttcaaggcgaaaggccatgttatcaaggtcttcactcatcatttcaacttcatcaatgacgtcgtagcgcatgaagacggcgccgtcctggagcccagcatcatcgtaagtattcacgacaacgccatcaggtgccagacggtcgatgtagccggtgtaaaccacttcgctattggcttgatataggttgatgaggtgaacctgttgtgcggctaattgtaaattctcaataattgaactcatcgtgtctaacccccttagttaatgttccctcatcatagcactttttgaggtgaagacgccattataagtcattattcagctggtttggtaagtgtgttatgactaggtaagtaaacggatgctcacgtgctattcaggtcgctcatctcattagaagggccttgttctgcaaatttaaaaccgttttcgcttgcacccggacgctgttaccggcattgagtgcggctgtttggtatgtgtgcaacacaacacggttctggtcatcgctacataaaaaatagtgttccgatgatgcgttcacagctagtgatcttaaagtgcaattcgatattcaaatgatgattgccaaaataaacgcatacggtttttttaaaacacaacaaatgtaagggctttctttacttgtgaaataggagtatcggtcaataagtatctattgataataggtaaatatttaataaaaaatgttattttcggtgctattaacgaggtttatcgttataatgtagtctgcggtttatcttgaccgtaaatctgtcatgacctttcaagaggcgcttgatcgtgttgcgacatacatttaaggagtgcactatgtttacgatgtttaagacgattggcgatcagttcgccaatttcaagattattcggcgaatggcgaagtatgatgatcgggccacataccaaagccattaccttgggttagcgtgggaatttctaaacccactgattcaaatcggaatttattatttagtattcggggtcgcgttaaaacgtggcgatccgatgccaggaatcccgtatttaccatggatggttgtcgggattgcaccatggttatacatgaacaaaacgacgctggacgcgtcttctagcatttatcgtcaggttgggttagtttcaaagatgaaattcccagtcaacgtattaccgtcaattaaaatttatggtaacttatatagtttctggacgatgattgcttttggaatcttcctgatgttcgttaatggcatttggccctcagtttcttggattcaatttatctactactttggttgtatgatcgtattaatgtattcacttgggatttttaatgccacggtcagtgttctgattcgtgactggcatatcacacttcaatccgtattgcggatgctgttctatatgagtggggtgctatttaactttacaacgtctaacttccccgcagtttttgtgcgcctactagaactaaatccgttctactacgtgctcaacggaatgcgggaatcgttgcttaatcgtggttggatctggcaacagcctaatatcacgttgacgattgtcttttggctcttcaatctcgttgtgattctgactggaacgtatctctataacaagttccgttcgaactttgtggatttgatttaggaggcggaactgatggaaaatcaatataaggttgaattgcataatgtcactaaagaatatgatttatatcgtagtaacaacgataagttaaaacacttttttaacattggtaatgttgatgtcccgcggttttggtcgctaaaaggggtcagcttaaacgttaaaccaggtgaagcgttgggtattatcggaatcaacggttctggtaagtcaacgatttcgaatatcatttcgggaatcattcctcaaacgactgggacagtggatgtgcacggtgatacgtccattatttcaatcggagccggcttaaagtggaatttaaccggtgatgaaaacattcggttgaaaggactcatgcaagggttgagtattaaagagatccaagcggttcgtgatgatattgttgatttcgcggatattggtgattttattggtcaaccagttaaggactattcgaccgggatgcggtcacgattgggatttgcgattgcggtgcatatcaatcccgacatcatgattattgatgaagcactctcggttggtgatgacaccttctatcaaaaatgtgtggataagattatggaattcaagaagcaagggaagaccattatctttgtcagccataatttacggcaagtggaattactttgtgaccgggtcgcttggatgcactttggggatcttttagaagtcggcgagaccaaggaaactgttgatcattaccggaaattctctaaggatttcaaagcgcaaacggcggcttatcgtaagaagtatcaggtcggtaagaagaaggaacaagcggactttgacattgtcgcttatgaacgacaattagtcgaagaaaaggctaaggatagcgataagagtaagcaggcagttagccgtcaagttcatcggacgctatacaagcaaatcttgccagaaaagatgacgattgccaccaagctcgtcatgttagtggcaattgtcctgttcgtcttctttgcgttagtgaatgtttcaggtcactcggttacttcggcgattgagaatccgacagtactgttacatccagtcaatcattatattaaaagtcagtcggtcttattcaatagtaagtgacggcggctggttagtggttgcattaagttaacatactaatatcgatgggtgattgcgatggcaatcacccattttttgcgtgaattcaagctggctttggttggaataaagtacaatacaacgtcgcgcattattcggactgggggccgctgatgctttaattcgaggggataagcttgggctgaccgtactaccaatttgaaaggaaaatgtctaaacttcaatgcacaatttatgagttggtttcgggttaaattaagcttgattttttgtaatgcttcagcaatctagttatattcgttataagcattagattattttccgcctggaataccatttggtgggttatcttaatactagagcataaagggggtcatatcatggatatgccactattcttaaatgttgtcgcctatgtgctattaatattggtattacaatatatcaaattcaaatttccagacagtacctttatccgtttctttcaaaaatacgggtggtggttaattgggctatgttttgtcgcaatactggtgattttggccggaccgcaatttcagaacccctttaatgcgttagatgtaccggctattggggtcatgttagtattcgggtacttctttattaaagataaaaaatcgaaacataagtgatgattaaatgagatagcacctcaaacgatgatgtcgtcctgagaggtgctatttttttgcctaaaaatcgatttgagaagcgctgatgtttagccgttttaatctagtattaaacgtgaactgggttattcggtaacggaggggcataattaaaaaatcagtttggaaccttgcaatatatctaaaagatatatatatacttaacagcgcgaaggattggtgaatttaatgtatgaattgtttattttaggacagttgatggatcatccgatgacgggctaccagttgcgtaaagcgctggtaaacgtagtcggttcagaattaaccattagttttggcgcgttgtacccgttgctagataagttagccgcggctgaagaattaacactggcgtttaagcggaccactaataaacggccacaaaagttagccacgataacagcggctggtcgcacgcaattttggcagttagttatgacgccagtcgcgctcaacaagcaaacgcagttaacgtttcaaataaagctgaattttttacatttattaagtcgtgatcagcagcaagtaatcttgttggattttcagcaatttgcacggggacaggtcgcacgcttaacggcgcagcacaaacgggtgatgacgaatacccacatgcttgccgctgatattcaagatgcgttgatggtcaatgagttacaacgggtacgagcccaagcacaattagactggcttgaccgccagttgcgcaatggaggggaagttaagggatgaaaacaatgtcgtttgcgactgatccacaaattcaaaagcatcgctggtggatactggttgcggtatgtttatttacgttcatgtcaacgttagatgggagtattgtgaacattgccttgccagtcatgagtaagaatttagcgattccaatgaatcaggcggaatgggtcgtctcaatttatttgattgtgatttgtgcgttattgttattatttggtaaattaggtgatatttacggtaagattcgggtgtttaaaatcgggtccttactattcattattggctcattattgtcaggattcagtgtggggttaccatttctactaattgcacgcagtattcaagcagtcggagcggcaatgacgatgagtacgaacaacgggattattaccgaagttttcccgtttaaggaacggggccgggcgctaggtatgattggctcattcgttgcattggggagtattgctggccccggtatcggtggtttgatcctagctcatttgagctggggctatattttctggatcaacgttccggtgggaatcttggcgatgattttaggtgcaatgattttgccaaaagacgttacgacgacgcaacaaccattggataagaccggggcggggctatttgccgtactcatggttgcactatttgcaggtgtgtttatcgggcaacagattgggttcttgcagccggttatcttagccttgtttgcagtggcaattgtgacgctgattatttttgttcgcgtcgagttgcgccatgaaaatccgctgctagcgctacaattatttaagaatgcctgttttagcattagtatcttatgtgcgttattaatttttattgcgaactttttctttaacgtgattgccccgttttatttagaaaatgctcgggggctagcggcaaactatgcgggctacgccttgatggtattccccatcgtacaagtggtggtcgccccgattgctgggacgatttctgacaagatcggaccagaattgttaacgttcgtgggattggtcctgatttcaatcagtcaagtgggttacatggttgtggggctagcaacaccactttggttcttcttattattcgtcggattagttggatttggcaatggtatcttcatggcacctaataattcgatcgtgatgagttcagtggcggtcaaggacttgggcgttgctggcgggattaacgcgttggcacgtgaattaggcatgattgttggaatttcggttgccacgaccgtactatattcggcaatgagtcaatcagcggggtataaggttacgtcatacctgccagctcacccggagatctttattgatggtatgcacattgcgttcatggtctcgttagggatttgtttagttgcgacggtcattactggcgggcggttactaaaacatcgacgcacggcacctgccaagtaaacattagcaaatcaaaaaacgtgttgcgagaaatctgagatgatttcttgcgacacgtttttatattcttgcatccttgatgttgctgaaagggggtctggttaaatcaggcttgttttaaagacccagggcataagctcactgaaaaaaacctcggattagcgccgttatgacgccaaactcgtcgtttaattccctagttaggctaatcctcagtcttctcccgtctgatttatgcccgcttgtgatactgagcattgatagaaatgccatgcgactgctttctcgaacgcactgaaacctgtgcatattacgcccatgattccgattatcggaatcgttgttgcttatctagcagttgcgctaactgaccacgaaattcatcgctatggtgttggatgttcgtcaagtcgtgactcatttgaacggtgtagtcagcgacttcgccgtgttcgccttgatcgagtccgagttcttcctcttgttcgtcaacgcgcattctgatgactcgtttcaatagtacgataatgacgatgcaaacgatggtagtaaagccaatggtaaagatcgttgctaatagttgtaatccgaataatttaaagccgccaccatagaaaagaccgtttagagaaattgtgttattaacggctttgctagcgaatagcccagtcatgatactgccgaccatgccggaaacaccgtggcatccaaaggcatcgagtgcatcatcgatacctaagcgtggtttgatgaacgtaatgaagccgtaactagttaatgtggcgataaggccaatccaaaaggcaccagaaatggtgacgtagccacaagcaggtgtaatcgcaacgagaccacaaagggtaccggtgcagacaccgactagggttggtttgcccttggttagcatatcaacgaccatccacgtcatcatggaagcggcggtggcaacggtcgtggttaagaaggcttggatggcgatgtcgttcatggcaagcgccgaaccggcattgaaaccgtaccagccgatccataaaatagcggtccccagcaatacccataagatgttatagtgctgggtcatatccttgccatacttgtggcgggcacctaagaatgctgataagactaaagcggtgataccggcattgatgtggacgacggtaccaccagcgaaatcgatgacgccaagtttagctaataaaccgttatcccaaaccatatgaaccattggatagtagatgaggagtgaccagaagatgatgaaggctaataagaatttaaaacggatacggccgaccaccgcgccaacaaatagtgctggcgtgataatggcaaacatcatttgaaagatgagatataaaccgttgggaatctttgtcgcggtaagcgcggtcaagtccacaccatgcaaccaagtggctttgagattaccgacaaagccacctaaatcaccggaaaaagatagtgaataaccgaatgcgagccataacaagattgctaagccacaaatcatgaagacggataacatggtgttaacgacattccgtttggaaactaagccaccgtagaaaaatgctaatccgggcgtcatgaataataccaatatactagataacactaaaaacgttgaatttgcagcgttcatactcccaacccctatccataccatttgatgttagaaattataacattgattattgagcgacgcactctttttttgtgtttaggttaaatattaaacttacaaacgggctttggtgtcattatggaactgttgatgttagattttgtgacgcaaaactattgaaaacatgagtggactccttgtaaattcttagcaaaagccggtcaaggttgcttattggcagaaatgtaggaagtgacttccaagagtggtcgcgattagttcggtaatgaaaataattaggcaatgggggggcaagtgattaattatcttaaactaattaggggaattggtaactatagtgcgtgctattgcttaagaaaatgatgatatgaaagataaggcgctttcagcagttgaccattagtaaccggagcagtaaggttatcaccacataaattaaaagatggtgagattattacataacgtcttaataattaaaacggaggttcagcttatgcgaaaatatgcgattattggggtcggtcacgttggagcgactattgcttatacattagtttgtaaaggaattgcggatgaattaatcttgattgataccaatgcggccaaggcccgcgcagaacaactagatttacaagatgctcaagcccggttagatagtcgaacgattattaagattaatgattatcatgaattagacgacacggatatcttgtttgttactagcggcaacattcacgcgttagaccacgcttccggtaaccggtgggctgaatttgaatatacgaagcaaatcgttcaagatatcgcgccgaaagttaaagcaaccaaatttaatggcgtggtcatcgatacaatgaatccgtgcgacgcaattactcactatttccaacgcgcaacgggattatcacgccaacaggtctttgggactgggactttcttggatacggcgcgcatgcaaaaggttgtcgcagaagccttcaactgtgatccaaaaaacattagcgggtatgtttacggtgaacacggcgaatcacaattcagcgcgtggtcaacggttcaggttaacggtattccaattacatccttagttgataagtatgatttggacttagatgcacttgaggcagctgcacgccatggtggctgggcggttcattctggtaaggggtataccagttttgccattgctacttgcgcggttaaattaagtgaagcggtctttgcaaatgctcgcttagcatgcccggtctctgcgtatagtgagacctttgggacgtatgttggtcagccagcaatcattggcaaagatggggtcgagagtgtgacgacgcttgctctgactgctgatgaacaagctaagttccgtaattcagcggacacgattatcgagaaattccacgcctttgatgacgttttaagcgatcaatcagtaaaaaaacgtcaacaagcctaaaaagtgacggttgttaattgtcttgtttggcaaacttctaccaaaatgttaaaattttactaagcagaacgttgactgcattaactatatggtgggatgaatatgcgccgacaattaacaaaccggcaacggtggttcgtgattgtgatcgcgacgattttgggagtaggctgtgccttgcttggtcaatggggccagttcttcggagtcatcgcagcaacgtttgcgctaatgttgttaaccagtggctgtttgactttttgtcatcgccgcgggtggcaacctggaagcggcatgttgctagcattagtcacggctacagggtatgtactagttattttaggaagctatggttatttactgcacagctaagcgcagcactttgatacgaggaatcgaccgtatcaaagtgcttgttgtctgcaatcatttttagcgtgctaattaagttatgtttcaacaatgattacggccatcggtgctcataaaaaaggtcgcgactcatcatcgcggccttcctgggtgcggtattgattgtaaacatcaaagtggggtcaccgcacccaaggtattaatggcagacctagttggatagctttacctaaagcctgccaacaggtaagcggtaacgcagacgcaccgccgcgctatcggctgcactaataccgttatagcgattatcagctaacatgacactgtggcgatcacggctgtgttccaaaccaatagtatgtcctaactcgtgttcagccacgtggacttgatccgtataagaatagtggtagcgtacaaaattacgtgttaacaagtacacttgcgcttttgtgtaataaccattggtataaccggtcgaaaaagtaataccagctaagcgataatactgcccactggtggcattactggtccccaaagtaatttgatgatgagcagtggttcccggcacgaatttaaagtgaccagtcgcattccaggcttggatggccgcttgatagacgtgccgctcgtatgatgatgcttgaatgacgtaggtcacttgagcgtgtggccaacgactccgtgaatatggtgtcgcaatcgattttgcgttggcaattggtgtcagcccaagaccaaaaatcacggttaatgtggttaaacctaacttagcactgtacttattcttcattgttgtaaccctctttcccccaaaaacgaaggtcgccatcaataattgtattttaaaacgttgctgagataggggcctcatcctagacccgaatttgaccaaaaatcgtgtgatttggttgcgattaaagttagttaaataggttatcgcgtgctatgatgagaatatcttgtgatgatggaaggaaattgatatgacgattaaacaggcaattgttcaacaagctttgacgttaataaaaccgcaaatggttgttggttttggtggtggctcgacggttggtgaactggtcaaggaggcagccaatcatgtgaatgatattacggtcgtcaccccatcaccgacgacccgccagcttgcgaccgttctcgggtataccgttgtagatactgcatattgtgaccgggttgatattgcttttgacggctgcgatcagttagatcattacggtaacgcgctcaaaagtggcggtggaatccatgctaatgagaagattattgccagtttggcggatgaatattggctgttaacgatgcaggatcggttagtcgatcaatttgatatcaagacgccactagtcttagaagtactaccagcggccttatcgttagtcatgcggacggtgagtgatcttggcggtcaggcaaccattcgaactgctaataatcgggatggcttcacgttaaccgatagcggcaatttattgatcgattgtcattttccaacgtatgccaaacttacggacctgaatgttgaattggcaactttggctggtgttgctgaaacgagctattttgatcatttggtgacgaatgcttggttgggcgatgcaaccacgaatacagtcaacgcgctattttaagtgttatcagggacgacagcatgaccttaatgattagcaattgagcactgaaattcgtttgacacttttttaaaataattctaaactgaaggtgacgtataaaagcgccaccattttttgaatctaagttattttaaatatctaaggggatgtcaacatggcaaaaaaagtctatactgattatttttttgaggaacctgcttacaacacacatgacggtggctatattccactagttacaccgaaagtcgagccacaaccgttagcgattccgccgttattgaagccggatcgccagacggatacggatgattactataccgtcacggcacaagaaagcgaaactcagtttttacctggtaagaagactaaaacgtggggctataatgcgggcttcctaggccaaactatcgtctttcgtaatggtaagcagacccatattgacttggaaaataaactcccagaattgacgactttccattggcacggcttgaatgtcccagggcccattaccgatggtggctgccacgcaccggtctatcccggtgaaacgaatcacattgactttaaagtacatcaaccagctgcgactacgtggttacatgctcatccgtgcccatcgactgcgacgcaggtctggaaaggcctagcaacgatggtgattattaaggatgacgttgaagatcagttaccgttaccacgtaattatggtgtggatgatattccgttggtattacaagaccgtgaatttcacgatgataaccaatttgattaccgggcggactatgatccagatggtgttcaagggcatacggcgttagttaacgggacggtcaacccatattttgatgtgacgacgcagcgggtgcggctacgaatcttggatgggtcgaaccggcgtgaatggcgtctgcacttcaatgacgatttggaatttgcacaagtcgcttccgatggtggcattttgccggcaccggtttatatgactaaagtgatgatgacctgtgcggaacgggacgaaattgtcgttgatttcggtcagtatcagccgggcgatgaagtcacgctgatgacggatgatacgccgctatgtcgtttccgaatcaagtcgttcgtaccggatgacaccaaactaccagaacatttagttgatattcctgatgaaaccccaacacctgacttacctgttcgcacaatcacgatggatgggatggatgatgaagtcgcgctggatggtaagaaattcgatatgagtcgcatcgacgctcggcagaaagttggggatgtcgccatttgggaaatccgcaacaccaacagtactgaaaacggcatggttcatccattccacgttcatgggactcagtttagagttttggcacggaatgatggtccagtttatcctaatgaacatgggctgaaggatacggtcggtgtcaaccctggtgaaacggtgcggatcaaggtcaaatttgagctgacaggagtttacatgtatcactgccatatcatcgaacatgaagatggtggtatgatggcccaaattgaatcatatgatccacaacacccacaaacttatcatttaatggatatggacaccttacggaatgcttttgcgaaggaacaaggcatcaagcccgaagatgtttggatgcccggtatgtaagtgtagattaagctaatttggtaatgagatgtgaataaagtccggttgcaaccagcaagttatctgcttggtcgtagccgggctttatcatttaaaagcacctcggggtcaaaacggtggcagttttgaccccggatttaccatgttttaatcatgatttgtgacgaattagctcgtataaagacaagtaagtctgtatttctacagtttaggcgcagtaactggtacaattcaagtaaggaccgaaaaaaggaggggattaggatgcacgttgcagcaatgattatggcgatcttggttgccgttgaacatttatttattttgtggctggaaatgtttaatgcggatagtgaaatggccgcaaaagcgtttggaattccacggcaaacgctacagtcgccgtcagtgcaattattgtttaaaaatcaagggttatataacggtttcttggccgtcggtattttatacagcttgtttgtgattccggccgtcgcgagcgccggtgcaaccctgtttttcttagcctgtgtgatggttgccgcggtttatggtagtattactgtcagtcgcgcgatcgtcgtgattcaggggctaccggcattaattgcgtttattctgatgtattttgcttagctggttctttgaagtaatgccattatattagtgttaataaaaaacgttgctacgtgattctgtagcaacgtttttggttgtctaagctatccatattatatggcagattggattacactttgccaatgaccgtcgttttagcagttgctagcacgtgaccggcaatggcatcatgaaattcgttgagccagtatccaggttggaggtctaactcagtatcaagtgcaaatagtttaaatgaataacgatgatccttgtcaggcggatacgggccgacgtagtgttggctaactttcggatcagtctcgtgaacataggcgcccgctgtggaattattaccttggaccatcggaatagcaccggtctgactggcattttcagggatgtgggtcgtggttgccggtaaattggcggcaatccaatgaatccaggtgaagccacctaccggaattgcatcgtggtcaacgaaagtgaacgccagtgaatgggtgccagctggcacatcactaatgtcaacgggaaacgagatgatggggtggcccttatacgtttgggtaacggccgcttgtttggaataggtggctgcaagggcgccattgatggtcggaattgatagttgcattgcaaatccctcctcgtgtaattagtcttattataacgctaatagtcgctggcgtagtgctgggtcaaccgcataaatataaagcccataacgaccacgtttcatcaagacgttgattgagttaaagataatctgctgtttaaggggacgcagatcgcctaagtctgtccggtttttgaacgcttcttgatcttcatagcgttcagggcgaacgacaatccgatcatggtcttcatcatagcccacagaagggccaagaatgacccccgcataattcaaatcaaacccttgaatggtataaatagaaccaacttcattcagtgtctcaggtcgtaaggcccaaggatcatcagttaagttgactttatcccacggaagcttcaattgtccggccgtcacgtaccaagtgccatgattaacgacgtacgggaagtcagcggttgccaccatccgagcgagtccatactgctggtcgcgttgtttgatcaggtcgtataagggttgcccgtcatcaaaaaagcgtagatcaaagttatcgctaacgggttttggttgtaattgcccgcgggtaaaaccatcgatccagtcgacaacatcggcgccgccagtgacccgaaattgctcgtctaagttgtagttcgcgtgcgggtactggtctaaaaatggcttgagatcgttgctgtgccagtagctctttaacttcaagacttgacgggtgtcgaagacgaggacaacgacgcgactatgattgatcagttccgttaactggttgtgacctgtaaagcggttatagcggtctggttgcgtgagtaataggtgcgcttcgtcgataaaaacaacgtctgcttgccggtgttcttttgccaaccggttgatcaacggagtgggcttttggaagtcttttttgcgcaagacgggatcttcaccagctaagcgcttataaattttgagcatttcattgtgattgacgacgagatagttgtcagtggcctgcaaatcgtttggtgtcaagctacgattgagggcttgtagccgagcaaacgcggcggctaatacggcactcttgccagttcctgcatcaccatgaataacaaagaggctgggctgtttttgctggcgatgggtacggataaaagttaatagttggtgctctaatgattgttgtgccggtgacaacgcagcttgatcatttagcttgaacgttgcggcactgattgtagatgacatattttttcactcccaaacacattatacctgcatattggggctaattgaaatgagagtcattacagttggtggtagaatagaattatgacaaagtgtgggaggaagtaacatgaaacttgatttttcggtggcggtgcatagtatcctgtaccttgatgcacaccgtgatagtaaggtcgctagtcgggaactcgcgcagtcactgcatcttaacccggtgatgattcgcaatattttatcagttctacataagcatgggtatttaacggggacggttggtaaaaatgggggctaccaattagacttggcgttggccgatatgaacctcggcgatctatatgatttaaccatccccccaacaattagctatgcgcgcttcattacgggaccatccaaaacggatgaacaggctgatcaatccccgattgcggccaatattagtgaaacgttgacggatttatttacagtagctgaccgtcaatatcgggcttactatcatcagtttacaatggctgatttacaagccgacctgaaccaccacggtacgtttttacaacacgaacaagattcagaatcttaagtaaaaagcgtcacttgattgaaaaataaggcgattttcgttaataaccttaatttgaaacgggtttgccattcaggattgtcagggctaattatcggtgctatcttagatgttattatgaaagtggcattgagattgaaaggggccttggcaatgacagcacggttagtgttaattcatgaagttggtcgttatcgagaattatcggaacaacggtactggttagaatccgccgatttttggggtgtcgatgggcgtggcgcgacggtcaatgaggccgtcggtaactttttgaccaacctcgtgcaatattgccgcgactattaccaacgcggcttgtggcaacttgatgatcggttgttacagctagaccacgttgatacagtgttagcgtacgcgcaggcaggtaagtcaccagcaccattatttttgtttaaattagttccggcggatcatgagttggcgtctgcttaaacgaaatattgacgaattcttaaagaagcgttcatacttccaccacactcctgcgctaaactatgcgttataatcaaagcgtaaattaattggagggtgttgtatggaattagataagatttatcagttaatggacaagtttgaacaaagcagtttaactagttttgagtatcgggaccaagattttgaaattcaaatgggtaagaagggacacggcaagacgacggtgaccccgcagccggcgccacttcccaatcagccggtgattgacccaacgccggtcacaccgacaccggtctcaacagttagtaccccagttgttgcggaggcggaaccaaccccagtggcgaccagtacggctagcaatccgacgagcgttgtaacacctgatcctgaaccagaaccagcgccgattgatcctaaggaatgcgtgacggcaccggtcgtaggaatctattacccagcgcattcttcagaagaagcgccatacgttaagttaggcgaccacgttagcgttggtcaacaagtcggcctcattcaagcgatgcagatgatgcggccagtggttgctaagcaagcggggacggtcaaagccttcctagtgaagaatggtgaagaagtcaacttcggtcaaccattgattcaattagtcccagatacgccggatgacatttaatcaggtacggtcagtggttgctgagcgtattaagcactttgagtagcactacgttttgataaaagcgtaacgcaaactaaaaatgaaccacttcaagcgcacatgataattgtgcaagctgaagtggttcattttttagcttaattaatgacgattggtagtggtttatttaggttggtcaatggctgccacggtttctaggaaccacttgttgaaagcagccgcatcaatatcgacacaaacggtcgcgttggttttgccgtcatggtaagcaccacgaatatcgccaacggtctcgccattagcggggccctccgtctggacatcaatccacatcttttcagtcgtgaaggcttctggatgtagtaagtagaagagcgtattgacatcatgcatcgcaacgccagtctggttgcggtcgttgtaatgaccaaagagggcgtggagcatttcgccagttttaccgagggtcggtaactgttcaatcgattcgcgcgttaaaagggccttcatcgtcacgtctaagccgaccatggtaattggaacgccggattggtacatgatttcagccgcgtgcgggtcggtaaagacgttgaactctgcggcgctggtcatattacctttgcctaaggccccacccatcgcaacgatttctttaatgtgtggcattacttcggggtaggtcttaaataagagcgcaatgttggtataggctcccgttggcactaacgtaatcggttgttcagcagccatgatgtagtcacggagcgcttcaacggctgtttctggtaatggttccgcaaggtcagtcgggaagtcgtaacccggcattcctgaaacaccgtgaattcggacggcatcttcaaacggtttgatcagcggttgggcagccccacccgctacgggaacgtcactgttaaagaagcgcgttagtttgagcgcattcagcgtcgttttgtcgaccgtcacattgccggcgaccgttgtaattaattgtaagtccaagtcaggatgatttaacgcaaaggtaattgcggcggcatcatcaataccagggtcagtgtccatgataatctttgttgacatgttcattcctccaattaaattgacgtgcttgaaattagttctattttagcatactacgggcaatgaattcgattgcaattgtgaagggtttgacgtagcatgacagtaaatacagttaacgatggaggaacggattatgagtcaaccacgggtcatcttaattacgggcgcatcttcggggatcggtaaagcaactgctttgaagttacaagctcaggggaacattgtgtacggagccgcacggcggattgaaaaaatgacggatttagcagcggctggagtgcacgttttaaaagtcgacgtgacggatgaagcgacgttaatcgcggctgtcaagacgattcaggtcgaacaggggcgcattgatgtcctaatcaacaatgcggggtatggctcatacggttccttggaagacgttccggtcgcagaaggcgagtaccaattcaaggtcaatgtctttggtgtgatgcggttgacacaattagttttaccgttgatgcgggcacaacatcgtggtcggatcattaatgtttcttcaattgggggaaagatctatcagcctttaagtgcttggtatatggggaccaaacacgcaattgaagggatgagcgattcgttacggatggaagtcgcaccatttggtatagatgttgtcatcgttgaacctggtggaatcaagactgaatgggctggtattgcggaaaaaaagctgttggcagtttccggtgagacagcctatcatgaacaagccgttaaggtcggtgcgatgctgtcattgttcgatcagtttgcttccaatccgggagtgattgctaaactgatggttcgcgctgtcaatgatgtgaagcccaagactcgctatcacgcaggtatgggcgcgggggtctcattaacggctcgtcagtggttgagtgatcgtcagtttgaccgcatgatgaactcagccgtcaatggtgcggctaagctgtcaaaagttacgcggcgtaaggaccggcgaaccgggagtcggcattatcggcatggaaaaatacccgctgataataattaatctgaataatgatgctaagaagcgagcccaacgatcacagttgttattgtggtaggggttcgcttctttatttcaagtctaaactttaagcttcccccatgtagcatgggagagatagggtctcgttagttattattttagctggtgcttggatgatgacaagcaggtggattcttgttcggcagcaatgatcgtcctattccgacctccggggctgggtgacaattgccggaacgtaagccgatatcgatttgagcccgtgcacaaacccgcccggtctcaaatacgagtcttattctaagccggaagtagcccacttccgactaagaataatttggctactgagcattgtcacccagcccctccggtcggtaagccgctcgaatggctgatgaacggccacttaacttggtataattggtcgctgactattttgataatggagccttaaactagaggttagggttacattaaccactttgttgaaacgtttgattactactatggtgattccgaaatagtaagctatcacaatgtcactttctgcctgacagttgctcgacaaaattactgtttatgaagaacaatgatgagtccaataaaagttgagtgcctcaccgtcagccattcgaatactatcccgactggaaggcgtttctgacaatgcccagtggtgaaatttcacttagcaagcgtcttgttcttggttagtgaaaggccagtatttgagacgtggtgtttcgacttaaatctgtgcccaccacgttccggcaattggcagaaatgcctggaagtcggtgtaggacgaactaaccaaacatgtttacgctaacccgaacttttccagcgggcctaagctggctgctttggacttaggtttgcaccgccattatagcttcgtcatcaccgccgttagcgtagtcgttgcggtggtcatcgcgggatcgtccacggggtggtaggtgatggtgaggttgggaaattcttcgataatgggaatcagcgtttgccattggggtaggtctggctggtcggcttcgggaacgtcccagttgttttgccgccagcttaaataacgttgttcgctaataaccgccgccacttgttcagttgtggtgtgaacatgaacgggtaaatcatgacgtttcaacgtggcgagtgcggtggtcagagcactcaaggccagtgaagtttcggtatgtccgtagccaccgtcgtttagcgccttttgatggtcagcgtatcgcagaatgacgacccaggcagcgggggttgttgcggtgatgttggtcgattggtggttggtacttgcaaggtaaagatgaatcgtagccattgttggggcctccttagttgtaatgataatccattgagtggttcatctaatagtttcgtaaaaactagccagcttcattttaaattaatgaataactttaacatgaaactacaatagttacaaaatttagtgaattgtcagtgcgtattactatgatttttggcggattatgctacgattaaatacatggataattaagaagttattaagtaataaaggtgagcactggaggttagcatgcagacattaatacagacgtttatggatcgacgcggggatttgctgactgcgctatggcaacacttggggatttcattagcatcattagtcatcgcaatggtaattgcgattccgttggctatttgggtcgttcgacgaccacggtgggccgagggattgttacagctcacgagtgtcttacagacgattccgtctttggcactgttagggttattgattccgttagttgggattggaacggtgccagcagtaattgcgctggtgatctatgctttactgccaatttttcaaaatacttatttgggtatctcagaaattgacgcctcaattgaagaggccgccgatgcctttgggatgtcacgaatgcgtaagttgtttaaagttgaactacccattgccctaccacagatcattgctgggattcggaccgcgctcgtcttaattattgggacggctactttggccgctttgattggtgctgggggtctcgggacctttatcatgctcggtattgaccgtaatgatacctcgttattattgattggggctatctcatcagcattgttagcaattctgctgagtgcgctcgttcggtggtttcaaacggctaaaccacgccacgccttaatcgtctttgtcggtattttagctttactaggtggtggcggggcttatagtgtttatgccaatcgagttgaaacaattacgattgcaggtaaactcggttccgaaccagaaatcttgattaatatgtataagcagctgattgaagctgaagatgagcatgttcatgtgacgctcaagcctaactttggcaagaccacgttcttattcagcgcgttaaagaataatcaggttgatatttatcctgaatttactggctcggtgctggagaccttagttaagggaaataacccagctggtcaaacagctaatcagacctatcagctcgccaaacagcgcctcgctaaacaggaacaaatgacttacttgaagccgatgcagtataacaatacgtacgcattggcagtgactaagaaatttcaacaagaacatcatttgaagacaatcagcgacttaacgcaagttgaatcgattctgaaacccggaatgaccctagagtttattgatcgtaatgatggcttaaaaggaatcaagaagacttatgggttagacgtgactgccaagtcgatggagccggcgctacgctatgaagccatcagtaaggggaaaatcaacttggtagatgcctatgcgacggatagtgaattacggcagtatcacttggccttattgaaggataacaagcacttcttcccaacgtatcaaggggcaccgttgatgaagacgaactttgccaacaaacatcctaaggtcgttaaagcgttgaataagttagcaggaaagatttcagaaactgatatgcaagaaatgaactatgaagtcaatgttaagaagcagtccgcttcgacggttgcacatcgctatcttgtgaagcacggcttattgaaggagggacgttaaatgacaacggcaattgaatttcaacacgtccagaaagactttaatgggcagaccgtgattcccgaccttaatttaacgattgaccagggtgagctatttgttttggtagggacttctgggagtggcaaaacgacgtcacttaaaatgatcaactgcttagagccactgacggctggtaaaatcctagttaatggtactgatacaaccacgataccagtccgaagtctacggtggcaaatggggtatgtcttacagcaaattgccttgttcccaacgatgacggtggcgcaaaatatcgccgtgattccagaaatgaaagggacagctaagaaggaaattaatcaaacgattgatgagctattggcggaagttggcctcgatccaaaggaataccgtgaccggatgccgtcagaattatccggtggtgagcagcaacgcatcggtatcttacgggcgattgcggcgcaaccagatattgttttgatggatgaaccatttagtgcgttagaccccatctcgcggcaacaattgcaagacttggtcttacggctacacgcccgctatcacaacacgatcgtcttcgtgacgcatgatatgaatgaggcgttgaagttgggtgatcggatcggtgtcatgcaacacggtcagttaatacaagtcgatacgccggctgctctggctcagcatccagtgaacgactttgtgcggaacttctttggcgcgagccgagctaaaaatgtctatgatgtctacgttgggcgtgtagggcttattcagggttatctcacagaagaacccagtgttgcgagtggtcggattcaatcgttagacgttcaagccacgttacgcaccgcctttacggcattgacagatcacgattatgtggcggtcacggaagaaaatcgggttgttggctatttggatcgccaacgaatcgtggcttacttgagtcaacatgaagaagtatcttaatcgtcaattaaggatgaatcagttacactaggttgtgataattgatggtcgctaatgaatttaaggaggaatttcgaatggcggaacagtacgatgttgttgtgattggtggcggaccagccggcaatgccatggctagcggattaaaggcccagggcaagacagtgttgatcgttgaagcggatctgtggggcggcacttgtcctaaccgcggttgtgaccctaagaaaatcctgttaagcgccgtcgaagcgcgacaagcggcgcaacatttacaagggcagggcctgattggcgcgcccaaaattgattggccagcactgatggcgcataaacgaggctatacggatggcatcaacgatgggacgttgaacggactaacggggcaagatattgcgacgttacatggccaagcacactttcaatccgacaatcagttagcggtcggggatcgagtagtcagtgcgactgattacgtgattgccactggtcagcgtccggcgattctaccgattaccgggcacgaatactttaagacgagcactgacttcttagatttggaccagatgcctaaacgcgtgacatttgtaggtggtggctacgtaggctttgaattggcgacgattgcgaatgccgctggcgctgatgtgcacgtgattcatcataatgaccgcccgttaaaagcttttgatgcagatttggttaaggatttgatggccgcaatgacggctgatggaatcacgtttgacttgaatacggatgtccaagcaattactaaaacggcgaccggtctacaattgacagctgataatttcgagctgacaacggatctggtcatcagctcagcgggacggattccgaacgcggaccagttaggtctagccaacgtgggcgttacctttgatcggcatgggattcaagtcaacgatcatttgcagacggccaacccgcacatttatgccattggggatgtcagcgatacaccggtaccgaagttaacgccagttgcaggttttgaagcgcgttatctggtcggtgagttgacgcatcccggcgcagccataaagtatcccgttgtgccaacgcaggtttttgcagcgcccaatttagcgcaagtcgggatcagcgcggccgtggcgactgagcatccagatgagtatcgtgtcaatacacttgatatgacgaagtggttcacttattaccgctttggcgcacaacaagcccaagctaaagtagtggttgctaaagcgagtgggcaggttgtgggtgctacccttctaagtgatgttgccgacgagatgattaactacttcacgttgttaattgaaaaacacgtgactttaccagatttacaacggttggtattggcttacccaacgccggctagtgacttacaatatttgtattaatgtgtggttgaattaaatcaaagtccagctattcagcttaactgaatatgtcagcactaacggagtgaccaggaatgaccggtcactctttttttgtttgaccggcgtttggagtggaatacgaaggccaaatgatgtcgcaaacagacggtcgtcattttcgttgtgcgactatcttggcgtgtaagtactgtgaaaaaatgtcaaaattgtagctcgtcgcggtggcactaatgttagcaaattaattattttatagaactagaagcgatcgcttaaatgctacgatgcttgctatggcagtatcgaactgtgacatagtacaaactagttttaaagtaaattcaattgtgcaaaatttaatttatgcaaatctattcacaaaacggtcgcgacatggtatgattcaatcatcaattatgatagcgttttcataaaactgttatgactaaggagtgacacaccatgaccgacaagtacattatggcaattgacgaagggacaaccagtacccgcgccattatctttgaccatgcgggccataaagtggccgactcacaacgggaatttccacaatatttcccgcagccgggctgggtcgaacataatgccaatgaaatctggaatgctgtcttgtctactattgcgaatgccttcattgaatcgggaatcaaacccgctcaaattagtggtattggaattacgaatcaacgggaaacaaccatcgtttgggacaagcaaactggcttgccaatctataacgcaattgtgtggcaatcacggcaaaccgcgccgattgctgagaagctggttaaagatggctatggtgatttgattcatcaacatacgggactcgtcacagacgcttacttctcggcaactaaaattcgctggatcttagaccacgtgaagggggcccaagaacgagctgaaaagggtgaattactctttggaacgatcgatacgtggctcctatggaaacttaccggtggggccacccacgtgacggattattccaatgccagtcggacgatgctcttcaatattcatgatttgaagtgggacgaccagattttgcaattattaaatattccagcggcgatgttgccagaagttcgcactaattctgaagtttatggcaagaccaaggactaccatttctttgggtcggaagttccaattagtgggatggctggtgatcaacaagcggccttgtttggtcaactggcgtttgaaccgggaaccgtgaagaatacttacgggactggggcttttatcgtgatgaacaccggtgaaaaaccccaattatccgataataacctattgaccacgatcggttacggcatcaacggtaaagtgtactacgccttggaagggtcaattttcgttgccggttcagcgattcagtggttgcgtgatgggattcgcctggttgaaagcgctcctgattctgaacgggcggcgcgcgaatcgcataatgaaaatgaagtctatgtggttccggcctttactggtttaggggcaccatattgggactctgaagcacgtggctcagtctttggcttgacgcgtggcacgactcgtgaagattttattaaagcaaccttgcaagcattggcttaccaaacgcgggacgtggttgaaacaatgaagaaagattccggtattgagattccagtattaaaagttgacggtggcgctgctcgtaatgactggttgatgcaatttcaggcggatatcttggatacgcaaattatgcgggctgctaatctggaaacgacagcgcttggtgctgccttcttagccgggcttagcgttggttattggcaggatttggaagaattaaaagcgtcgtataagcccggcacgagttttgaccctgagatggggccagctgaacggacgaacttatacgagggatggcaggcagcggtcaaagcgacccaagtctttaagcacaccccataccacgcaggaaaatagaggaggacaacaacatggcattttcagcaacgacgcgtcaacaaaatattgaacgcttacaaaatgaaacgttagatttactcgttatcggtggtgggattaccggtgccggtgtcgccattcaatcaactgcaatgaacatgaagaccgggttgatcgatatgcaagactttgcagaagggacttcatcacggtcgacgaaactggtccatgggggcattcgctacttaaagacgtttgacgtgggggtagttgccgataccgttaaagaacgggcggttgtccaggggattgcgccacacattcctaagcccgacccaatgttattgccgatttatgatgagacgggagcgaccttcgacctcttttctgtcaaagtggcgatggatctgtatgataagctcgccgaagttaaagatcctaaattcaccaattataccctttcacgcgaggaagtcttacaacgggaaccacagctgaaccctaaacatttagttggtggcggtgtttaccttgattttcggaataatgatgcgcgcctagtgattgaaaacattaagaaggctcacgaaaatggtgggattatggcaagtcatgtgaaggcgaccggcctcttacatgatgatgatggccggatcaatggtatcaccgctgaagacttattgactggtgcatcgttcgagattcatgcccgaatcgtcatcaatacgaccggtccatggtcagacacgattcgtaagatggaccatactgaaaagtatcaatcccagatgcggccaaccaagggtgtacatttagtcgttgacgctgagaaactcccagtgccacaaccaacctattttgattctggtgatcaagatggccggatgatcttcgtggtgccacgtgaaaacaagacgtatttcggaacgactgatacggattatcatggtgatctgaaacacccgaccgttacgcaagaagatgttgactacttgttggaaatcgtcaaccgtcgctttccaactgctaaaatcaccttagatgatattgaggctagttgggccggattgcggccactgattgccgctaacggtagttccgattataacggtggtaattcagggaaaatcagtgataagagcttcaaggaagttatcaaggttgttgatcagtttgaaagtcaggaagccagtcgtgaagatgtcgaaagtgtcctgaatgacttggaaacttccttggcagaggacaaactcagtccgtcagcggtgtcacgcggtagttcgttgactagtagtccagacgggctgttgacccttgctggtgggaagattactgattaccgtaaaatggctgcgggtgccatggcgctgattgccaagattttagcagataagtatgatgcccactttaatgaaatcaattcgaagaacctccccgtttctggtggcgatattgatccgcacaacgtggatgcaacgattgcattttatgctaaacaagggacggataatggtttgacgaatgatgaagcgttgcggattgcaaatatgtacggttccaatgctgcgcgggtctttagtttgattggtaaagttgaaccgacgcatggtctgagtttagccgaaacgattagcttacgttatgctttggatgaagaaatgaccctgacgccagtcgactacttgctgcggcgcactaatcacttgttattcatgcgagatacgctggatggcttaaaggatggcgtcatagcgacaatggccgattaccttggttgggatgctgcaacggtcaaagcacaaaccgaattattgaatcagacgattgctgaatcggacttaacagcactgaagcagggctaaggaatggggtggtcatgatgaaagatccattagcactacaattgttgggggaatttctcgggacctttatcttgattctgttaggtgatggggttgtagctggggtaacgctcaataaatccaaagcgcaaaatgcgggctgggtcgcgattaccttaggttggggatttgcagtcacgatgggcgtctatgcgtccagctttatgagccccgcacatcttaatccagcggtctcactaggaatggcagtggccggtaagttcccatgggcctacgtgattccatatagtgcggctcagattgctggtggggtgattggtggcctcgtggtttggttgcactactacccacactggcaagcaactaaggatgctggcgcgattctcggcatttttgcaaccggtcctggtatccggcgatatttctggaactttatcagtgaagtgattggaacgttcgtcctagtctttggcttgttagccttcacgaaaggccaatttacggcgggattgaacccgattgttgtcggaattctgattatcgctatcgggctgtctctgggtggaacgaccgggtatgcaattaacccggcccgggatttaggtccccgcattgcgcacgcggtattgcccatcgccaataaaggaacttctgattgggcctacagttgggtgccaatcgctggaccattggttggtggcacgttaggcgcactgttgtttaatgtattgccataattttatgactgatttgatataaaccgtgaggactgttggaattgacaacggtcctcacggttttatttgtgagtaatggttgaaattcatgctttcattaactgagtaaaacggcaatagataagcagactaagacgtcgaataccgtcaccaataccattgacaatcaagcgaccatcacggtacatcattacatgaccgattctactgataaagttgctcctgatgaaacagtcaaagttggttacgggaaagcttatgatgttactaagcaggtcaaaacgataactggatataagcgtaatgccacattggatgaacatacccgtggcactgctagcaagactaccaaagaagccgtgatgtattatgatccgttgccatacaacattcatgtcaattacttgttaacggatgggcagaagctggacgaattggatgtcactggtctatatggtgatacttacacgactgagacaactgatttcgaagatttgtacacagttgatactgatcgcttaccgacgaatgcccagggaacggtaacggaaaagccaacaacggtcaattattattaccaaccaacgactgggcagtgggttgacgttggtaatcaaagtagtgttttagtacgacaagatacgaagcataatgtccgttctgtctcgcagatttatgccaacgatagtggctttacggtcaaatataatcaggatgctgctcaagttgcgattgcggctagtgatacaaacggtacccaagataacagcttagtctttgattataattcgaagtatacgtttgaattatctaagaatgagactgtcacttttaaggttgatgatcaaggccaagtgactgcgactagagtgttaggcgcagagcaaacggtcacgacttttgataaaagtggtcagcttaagacagtgaccacggtgactaacgcgaatggcactaagagtcagcagaccaacacggttgacgggttgaaatcaatggtgactggcgaacaatacgacttaggattgttgaatggggtgaaagttaccgcacaaaaagaaatcaatccgagtcaagcagcaacgactgagtccaagacaacgactgatactagtcagtctggtagtaatcagtcgacaagtacgacagcgactgaccaaactgagactaatgaatcaacagctggtagttcgaccaacgcaacgaacgcgtccagtagtgtcgatgcaagttcagcgaatagtcaaggcgacactgaggctacaagccagtcgggtactagtgcaagtgctgattcaaagacggatagtagtgcggcatcaagcactagtcaaactactgacggtgaaacaaccaataccgatgatacgaccactggaacaactactgacagtggactgggtttcaagtcaccatttactgaggatcaaaacacaagtagtgcactgggcagcgcccaaacttcgagcagtctcaatagtgatacgagtgcagcggtacaagcattgattgcagaacccaattccacgccggttgtcttgggtgaggacgcttcttttgaggaaggcgtgccagtcaatgatccggtattcagtaatgatgaaggggtttcgccgaacaacaatccaagcagcgcagcaacgccccttgcgcaagctacgaatacccgggcgcgtctgactcaaaatggcaaactgttatatgaaggaacgctgcaggctgatcaaggggaacagaacctttatgtgtcgccagatacaaccgttgaagttgatggtggggccgatggtgacggcttttacctagatacctatgatggtgataagggaatggcctatacattgggttcaggctatgcgtgggcagccgaaaacaatgatgtgactgcggcaccagcaagtagtgcgacgaccagctctgagagtgctgccagtgagtcgagcactaatagtagtgatagtagccgtacagcttcaagtgcggccgaccattcgactagttcggcaagtattagtgatgcgagccaatcaagtcattcaactagctcaagtgaaaatagtcgttcagaaagctcatcaagctcaagtacgaccggtgattcggctgacgcggataaacaggccgcagctcgttccagccaaactcagtcgaatagtgttaatggtagcagtcaagcagtaggctctagcacggtcactagtcaatcgtcagtaccaactaaagctaatacgaagcaggcttcatccacgccaacgaccaaggctaaccgagcaactgtcgtagccgctaccagttctacagcgccacggcagtcgcgggctacgacggcaagtgcgtcagttccaagtgtaacctcagcaagtgctgcggcggcaagtcgtgctaagcaacgatcggcgttcaagaagcaacatccaatcttgaaccaaattttgcctaaaacgaactccgcggtcgcgacctggttggtctggctaggagtgggtttattgatactcacggtagcgattacgatggttattaagaaacgagggcgtgactaatatgataaaattacgccaggttcttaaaaaaatcctcattggcctaatggtgtttgttctagttttcacggctttttccagctcggtcgacacagtctccgcacatcgccgtggtgtgacccacactcggaagcataaggtgcgacatagcgctagtggtcacgccaagaagtctcatcgtgcacatcgcaaagctaagcgcagagtcgtccaccgtaaagcaccgcatcggcggaaagttgcggtaaggcataagaaaaaaacgccaaagcgtcataaaaaggcgcataagaagaaggccgttaagaaacataagaagtcgcacaagaagtcacacaagaagaaagcggccaagaaacataagaagtcgcacaagaagaagtcttctaagaagcatggcaagtcgcacaagaaaaaatcttcgaagaagcacggcaagtccaataagaaaaagtcttccaagaaacacggcaagtcgcacaagaagaagtcttctaagaagcacggcaagtccaataagaaaaagtcttccaagaaacatggcaagtccagtaagaagaagtcttccaagaaacatggcaagtcgcacaagaagaaatcttccaagaagcacggcaagtccaataagaagaaatcttccaagaagcatggtaaatccagtaagaagaaatcatctaagaagcacggcaagtctaacaagaaaaaatcttcgaaaaagcatgcatccaaaggtagtgctgtaattgccacgcttagtcgtaagaccggtatcagtaaaggcatcatttcgcttttgacggatctagttgggtataatgatatttataccatgattacgggaaaagatgccgctaccggtaagaagcgctcgcggttggtaggagcggcttggacagccttgaactttgtgcctgtctcgaaagtcgctaagttagcaaaggccgcgaaggttctggcaactgctaagaaggccgagaaagttgcgaagaatggtggccggatcaaacgggccgcccgagcaactaaactggcgacaaagcgagcggccgagaaactagctaaacgaaagcccgccaaaaagactgcgaaaaaggcagctgagaaggctcgtaaagctaaaaaggtcaagactgccaaaaaagctaagcatcaacaggcaaagcccaaaaagacttcccatggcacgaagcataaaacgaccaagaagcagcagaagcgatataacaagaaaaaagctgcgggcaaggctaggaaagcttcgtatgcacggaaaaagggcggtactaaaaagaagccgggcaagcgtaagggtgctaaagctaagactacaaaacgaaaggctaagaataaggtaaaaaaggaccataaggctaagaaagccagtggggctaaagggtttaatattgacgaaattcatcccaaattaaaaacagagccagatactgcattcttttggtctggtagaacagatggcgttggtggagctgacatagcggctgatgtagctaaaagtaaaggtggcgttactttagaatcaacaataggaaataaaaatattaaaatgccagaatgggactttaataaacctgagtcaatgaaagcttgggatttggcttctggttcgtatgcagaacaagtttctggtgaagttcgtgcggtagttggttcagagttgagaaaagggaatatttgggaaaacgttgagctacctagattaaaaaataatcctaaagtaacgaaaataacaacgattgatcctaaaacaggaattgaaaaaataatttttgagaggaagtaagttaaatgaaaattacaggtagtagttcacatgtgaaatttgatttggagaatgagtatgcggtgaaggcagagggagaaatgttagtgggaggtcaatttgttgtattcaaagattctatgaagaattgggaaccgccacatgaagatgaaaagctttccgaagctgaagtacaagaaattattcaacaggtaaaacagaatacaaatgaaaacacagtacaaatttcatttgaataaaaaagtattagaattagagtaatcggttaattctgtgaggtaaaacaacttttaacgaaggaattaggtttttaatacgctattttgctagattttgagggcgaagtagaaaagattttaaagaacagattcaaatgctaaagcaaacgatgggcatgttatgctgaaaaggctcgaggaacaagttaaagtgctagctatttagtgagttcctcgggcaccaacaaactgactttctttatagtgttttatggattagaagagtcatttttctcattttcttccgcttcttgtagaagcagaagcaaacaaaatagttcggttgaagatccagaacgttgatgaaattacgcgttctggacttttagactgttaccagtattaatcaaggtatcatttcatgtctaacggatctagttaggtataatgatatttataccatgatcacggggaaagatgccgctaccggttacaacttggtcacggggacacgatgatactttgcttagggtccgcgatggtaaaataactgatggtggtattaatagtcgaccagttcctgctatgaaagatggaatgcataaagtttcttggtatatcaagaatggagtgaagttaccttgacaaaaagattaagtgaacaggaaagttacttttcaatgtctgagtttttggaatcctactattgggctagtagagacgatgatcttggaagtctattggggagtgtcacactttggagtgatgatggggaattgtttgatcaggcaattgcggaagactggcatgctttctttagcgacgtgagcaacgaaaatcacactgtgtttgagagctttcaagccgtcaagcagtttgtgaatgaatatttgccggatatcgcagcaacgacaccagtatcaggaagcttgacatataacattagaataatttgtgagatgacagaatctcaacgaaatcaggaacccgtgtggcaaaattgggtcgcggctgttaattggattacgaatcctaatgttgtgccagtcaatgaatcgccctttcttaaaacggggcaatcattgcctaatccaaaggaaaagggttttcggcaaaatcaatttccaattgccaaggttttgccagcgccacgaccagaaattccgatggggcccagtctggaaaaggtgaacttgacacagtcgtattatgcgtttgtgaaatttttacagcattattatcaggttagtgatgatagtgaattgggtaattttttgcagcaaaatagagctatcagtgaaaataatgaagaatatcgctattggaaggggaagttttcgagatgctctggtaataaaaagctattagatattttgaaggccttcttaatggtaagggattattttgaaattgaatttccggacaatgcactgcatacgcatcctgtacgtaaattgagttgtaatctccggaaggcagcgtatctgccacacagccaacgtattcagactgaggtttggcagaattggttaacggcagttcatcaagtaatagagtaagtgacaatgtcatttgataatcagttgagttctcaatttaaagatcaagaggatagttataatgcgattattttgttgtatgattatagctatgataaagaacaaggctgacaaatttgtccaaaaattcggattaaatttgcaatctaccattatagcaaataatagtcattagcgagtaaacaagcgaataaatatcgatatttattcgaataaaaattgacaagcaatcatgtgacctactataatgaaagcgaaatcaattcggtaatacgggagtaggagggggaacatatgcaagttgaacagcgcacattaaatactgcggcacacccatttcagatcacggcgtattggttagaccaaattagtgattttgaaacagctgttgattatccaatcatgattatctgcccgggaggtggttttacttatcattctgggcgggaagaagcgccaattgcaacccggatgatggccgccggaatgcatacggtggtcttgaattaccaattaattgtgggagatcagtccgtctatccttgggcgttgcagcaattaggtgcaacaattgattggattacgacccaggcgtccgcgcaccatgttgattgtcagcggattattcttgccgggttttcggctggcggccacgtggttgcgacttataatggtgttgcgacccaaccagaattgcgcacacggtatcatttggatcattatcaaggccagcatgctgccattattttaggctatccagtcattgatttgacagcggggtttcccacgacttcggcggcgcgtaatcagattaccacggatgcccggttgtgggtagcccagcgcctggtcacaccagctagtaaacccgcttttgtctggcaaacggcgacggatgagttggtcccgccaatcaattcgttaaaatatgtgcaggccatgctacaacatcaggtcgcaactgcgtatcatttatttggtagtgggattcatgggttagcgttagccaatcatgtgacgcaaaaacctggcaaggacaagtatttgaatgaccaggctgcaatatggccacaattagcattgcggtggttacaagaacagggattgttagctggtaattattgaaaataaatctgggcgatcagtcgtgcttcactgatcgcccgttttttgtcaacgatcctgacaccaattaattttctgcggtataataatacgaataagcttattaagtaagaaggagcgattgagatggcaacaaatcaacacttggtcattatttccttagatgcgttaggatttcgtgatttacgcgaacatcaagcagaattacccgttctgagtggattgatgaccggtggtacttgggtcaagtcggtgacaggcatttatccaacactgacatatccgtcacataccacgattattacgggacagtatcccagcgtgcatggaatcgttaataatactaagttacaaccgacacgccgttcaccagattggtattggtatcaaaaggacgttcaagtaccaacactatatgatttggcacggcaaaagaagctaacaacggcggcttttttatggccagtgacggctggcagcaagattacatataaccttgccgagatctttcctaaccgcatttggacgaaccaagttctcgtctcgttgaaggcgagttcaccgctcttcttactcgcgatgaatcataagtatgggcatcttcgtaatgggattaagcagccccaactagatgaattcatcacggcttgtgcagtcgatacgttaacgaataagaagccgaacctaacgatgattcacttagtcgacatggatagtatgcgccatcgctatggtgtgcgatccagtgaggccatggcagctttacaccggctagaccggcacgtgggccagttgattgacgcgactaaagctgcgggcacgtttgcggataccaactttgttattttaggtgatcactatcaaatcaatgtggatcacatgattcatttaaatacgttattcgctcagcagggctggttgaccgcacgtcaagatcagacgtttgaagatgactggtccgtgatggcgaagacggcggacggctcaacgtacatttatacgcgaccggaatttgaccagttagatgaattgaaggccctggttagtcaggtggaaggtgttgagaccatcattactggggaggcagctgcacgtcgtggtgccgaccccgcttgtgcattgatggttgaagcccaggaaggctattattttactgatgaaagtcgacgaccaactgtggttgaacccgtccatccagcgacactcggacaaccagaccgttaccacggggttcatggatatgacccgactaagcctgactatcaaacgaccctgttattcaatggaccagcagttaaagctggtgggacgattgaaacggctaacttagtcgatgaagcgccgacatttgcgcggttactcggattgaatttcgatggccccatgccgggacattgcctcgatggtgtttttaaagactagacaaaaaagagagagagaggaaaagcgggcggacatcagcaccactaatattgtggttagtgctcgttccgcctccgattgcgatcagaggttcccgcgaagtaacttaatgaaatttaataaacagcagtggggttggatcttttacgattgggccaactcgggctatggcattattgtcacaacggcggtgctacccgtttactttaaggcagttgcccaaagtagcggtgtgacaccggctaatgcaacggcttactggggttatgccaatagtattgggaccttactagtttcgattttggcgcccgtcctaggtgcactagcagactatccccatgccaagaaacgaatgctcaacatcttttcgatacttggaatggtgatgacgctagggctgagtgttgccccgactagtgcctggaagtggctattaggtatttatattttatcaattatcggttattccggtggtaatctgttttatgacagttttctgactgacgtggcgccaaacgatcagatggatcgattatcgtcatatggttatgggtttggctatctcggtggtgtcttggcgtttatcttattcttggtcttacaattaaccagtggttttggtcaattatcaagctatggggtcgcgcggtggagttttgtcttagccgctgcgtggtggattatcttttacattcctttgttgaaaaacgttcaccaaaagtacgcgttagcacccagtgcgcatccggtgcgttcaagtttccaacgggtatggtcgactttgaaacacatccggaattatcgcgctgcggcgtggttcttggtggcgtacttcttctacattgatggagtcgacacgatctttacaatggcaacttcgattgggatggatatgggaattacgacgaccacgttgatgattgtcttgctggttgttcagctagtcgcgtttccgttttcactgctttacgggtggttagcgaataaaatgtcgacccggacgggcatcttgcttggcattattatttatttaggtatctgcttgtacgcgttgcggttgaatagtacgacggatttttggattttagccatactagttggaaccagtcagggtgggattcaagcgctcagtcgttcgtacttcggtcgtttgattcctaagactagtgggagtgagtttttcggcttttacaatattctcggtaagttctcagccgtgatgggccccgtcctagttggaatcgtgacccaaatgacggggaagtcaacgattggtgctgcttctttaagtattttatttgttgttggattagtgattttcttggctctaccgcatttgaaccagaccaagtcggtttaagccagggtttgtttaatatcatgtaaaaagaacttcttctaatttggagaagttctttttacgttgctcaacctcaaaccatcatgagttataaattcatttccgtattccgctgtaatacaaaataaatgacaagccaacacaatacgcgctaattataacaatctgaaaggcatagctatcagcaagccttgggtcagttaatcagtatgtgtgattaagaaaaagtctgttccagtctggcataatttattgccaggctagaacaggctttcggtgtcaaagatgcttgtgagactgatgcgattggcgataagtctgggcttgcttagtgcgaatattacgaattgcaaataacgtattatcaatccgggggtgatgatgtgtttctaagacgctgacttcatcaagcaattggttgccaatttgccagtcgccaaagtagagattccagatgccaagccagaattgttggctcaaccgcccatcccagtttaactggtgactgtcgatggcagtgaacttggttttcagattttgagcggattgaaaatcatgaaagttcaatttagtttgaaatagtgatccataaaaatcgagtaagtcgttgctgacgtgaaagggatcgccccaagccgtttgataactggcacaattggcggccatacgggttgtcagtggtgttagtgcggccaaaccgtcgatggatgcaataattggaattagaacgggcactaattttagttcctgcagggtccaagtcttggcttggcgcaggtgatcaaaagcgggctgggtcgtggttgtcacgccgactgaacgatggtcataggatagcatcaagatgctggcataactggcgatgagttgttcgtaggcgtgggggctgtgtcgatgttcgcgaatccaagtggctagggcgggaaaatttagcgtttcataagcgtgacgaattgtccaaagggcctggtcatatgctgatggctggtagttttggtgtatgaatcgtaactcgtcggctgaaattgctaagttatccagaattgcaaagagcttactggcgccaatatcgttggcaccactctcaaagcgtgaggcgaatgagcgcgagataataccgctatacacttcttgttgagttaagcccttacttaatcgaatctgatgaatagtttctccgatgtttgtcatctagcactccttaatgtggcatatatgcaacctacttgctgattgtaccacggtaatgacgagtaagctaagtccattatcttaatgggagatgggttaatgctgactttattaaaaaatcggaccctccaaacgattgctagtgcaaatttttttacgacgctgggggtgagtttgttcaatatcattttactcacgtacgcaaagaattttccaaatccacattggtttgttgccatcgtttcggtggtgacagttgtgccgtatgttttcgggggattaacggggcgactcgctgatcagacgcaccgaaaaactaactggctgattggtactaaggtcgttcaagcggggttatatctcgtcttggcccaagtgattactcagcaaactgtggttgttttctacgtggtcgttgcgattaattttatttcggatctactaggacgatatggtggcagtattttgacaattgttattcaagaccggattgggcctgacgatcgccaacaagtgatggggtttaatgcgagcgtaagtacacttgttgagccactgggtcaaacactaggggtcttgattatcgcccagtggcatgattatgcgttagctggaatagtgaatgcgatgacttttattggggccgctagctgcttgttagccggacgttcagcgattcagtcgactcccaaagttgctgtacgaccacgacatattgaggcctggcccgtgattcagcgagtgatgctgacgacgactagaatgggcgcagtcagttatctgggtattctgatgattttaaacgtcgcaacgatgagtattgatgcgattttgaacttaatgtttattgacttggcatcccgcatgcccgtgagctattcggtcgcaattttaatggtcaatgtggtctttgttaccggaagcgtattgggtggcattactaaaaatacttggtttgatcggctctcgctgtttcaattgttactggcagcgattctagcgccgatgctgacctatgtgattttactagtcgttccacaactaatcttgattcttgggggcatgtttgcagtgggcttcatgagtggcaaactggacccgaagatgttcgccatcatgatgccacaaattgaccccctcttaacagggacggtctttggtaccatcagttcgattgtgacgttggcggcacccgttggtagcgtcggcatcgttttattatataacttagttggtgcgacggcggcgtgttcggtggtgattggtatgagtgcgctggcgttgatctgggcagtgatggcgcaccggcagtgattaattgctaatcttttgttattgatatttcaatttggcgttaggatgtggctatcagctttgtgatgacttacgaagggatttagtgaaatgcagtgctcaaaaagccatcttgggacggcttactaactgaaatggtgcattaaggaaaaggacgttagttttgtccgcttcattagcgccatctcggcaaaacaaaagcgtgtctaacccccagccagttaacttgctagggcgttggacacgctttttgattaaatattcgatcaggctgctgtgatgaatgaggtcggtcagcagttcattggttaaacgtggaatagggccaaatgcgtcttcaaatattgccctgttacactagttggattttgactaacggctaatggggtaccggtggcgacaatgttaccaccgttgataccgcccgcgggtcccatatcgataacgtaatcagcgttggcgattacgtcgagatcgtgttcgatggcaatgacggttgccccttgctgaatcagttggtcaaagactttgacgagttgctgaatgtcgagcgggtgcaaaccgactgaaggctcatcgaagacaaagagcgttcccgtttggcgtttgccaatgcgggaggtgagcttcaggcgctgagcttcgccacccgagagtgccggcgtactttcacctaatagtaagtaacctagtcccatatcatgcaggatctggagtgtattagcgatggcggattgcgctttgaaaattggtagggcctcgtcaaccgcaagatctaaaatatccgcaatcgaatagccatgccatttgacggtcagcgtctgtttattgtagcgtttgccgtggcattgggggcagacttcggtgatgtctggcaggtattgcacatctaaggagatttggcccgtaccaccacaagttgggcaagcacccgcagcgacgttatatgaaaattggctagcggtccaaccgtttgcttgtgctgctggggtggcggcgaataattggcgtaggtggtcgagaatgttggtataagtggcgaccgttgaccgtacattcttaccaacgggcactgagtcgacggtaacaacgtgccgaatgtgaccattgtcaaaggccttaacgtgggttggaagtggtcgctttttagctgtggcaatcagtgctggaatcaaactatctagtaccagagtcgttttaccagcgccgctcatacccgtgacggtcgtgaaacggtttttgggaatgcgcgccgtaatgtcttggatgttaaagtgatgagccacctcaatagcaagggccccctttttccagagtgcatcgtcggttaatacggggcgttcacgcagcgtggcagtaccggtgagaaatggcgcaattaaggactttttgtcccgcttgatggctgcgacagtgccttgtccgacaacggtaccgccgtgcttaccagcccccggaccaatctcaataacatcatcagctgcactgataatactagtgtcgtggtcaaccaccacgacggagtttccttgggcgactagcccacggaaagctttgattaggcccgccacgttagctggatgaagcccaacggaaggttcatcaaggacatatagcacgccagtcgtggcgctgcgcaaagtgcgtccgagctgaatgcgttgtaattcaccagttgacagggtcgcgccgggacgactgagtgtgaggtagtcgagtccaagttcttccatgggttgcaggctgagtagcaattcatcaacaagggattgtccaagatgatgcatcttagtaggtagccacgggacaatcgtggtcgcaaaatcatgcaaggcggcgacagtcatatcactaaccgtcgcaatattttgaccatttaattcgtagttaaacaactgaggattgaagcgtgatccgtgacaatctggacaagtatcaaacttgtaaaagcgattcagccgagtaattgcccgttcatttttggtcgtcgccatactatcttcaacggcggcaaaggcgttctcgtagacagcgttgtccatgtgaaagattttacccttagcgcttggaatgttgatggcaacggtttgcttaggaccatgcaatacgcgtgttttatcggcttcactaaggtttttatacggaatatcgatgggaattccaatttcgcgtgcaacgatcggcataaagttacgtccaggcaggtgccaagaagcaacggccccttcttcgatagtttgattttcatccgcaataatgagtgccgggtcaatttggcgaacttggcctaggccaccgcaagtcggacaggccccacctgaattgaaggcgaaatcttcggcgccgggcgctctgaatttggcgccacaagtcggacaggtgacgtaaccatcattttcagccacatcgagcgttggtagcatgcggtgaccattggggcaaactgctgagctgagtcgtgagaaggctagccttaagatatttaagctttcagacatggtgccgacggttgaacggacgccgggaacctgggggcgttggcgtagcgctaatgcggatggtaagtattgtactgaatcaacactggctttgccgacctgattgattcggcggcgggtaaaggttgacagggcgtttaagtagcggcgggccccctcagcgtacaggacgcccattgcgagtgatgacttaccggacccactgcgaccagtaatcgcaacaaattcgttgagtggaatgtcgatatcgatattttttaaattattgacgtgtgcgcctcgcacttgaatgtgagtcggtaacgtggtttgtggcatgactaaaacccctttcgtgtcactttctatgctacaacaaaaggacggctttgcctaagaaagcggtggcagtatctcgcgccccacggctgggtgagtatgataaactagggctaacgattattggagggggcgatggtgagatgtcgaagaagcgacgattaagttggctgagcgtgctcggactattggcaggattttgttggtggtttagcttagcaatgcgcgcggctgcggattatgatattgaccaatatcaagtcaatgtagctattcaacgtgatggtagtgcgaatgtaacgcaagcgatgacttatcaatttgatgatgattatcacggggtatttaatgttcaagatttgaaaggtattcagggggcccagttggaaggggtcacgacgcaactgaatggtggggccacggtgacggcggcgccaagtgaaatgggggccaacaacacgtatcagttgacccaaaatgctgaccggatgcgtgtcaagctctaccggcaagttcaagaagatgataagttacgggttgtctatcggtatcggcttaaaggggtcgtaacgaactatgcagacacggccgaactgaattggaaagtgattggtagtggctgggatgtaccactgaataatgtcaaaatcgtgattcagttacctgccaagaatgtgagcgcgctacaagcttggacgcacggaccgttgagtggtcagacgaaagttgagcgcgcggcaggccgggtgacgatgacattgggacataatcccgcgaaccaattcgttgaaagtcacctactatttccaactacggtcacggcgacgaatacgcggacgaatactgccaagcgaaaagtgacggtccaaaaacaagaagctaagttggcacaggaagctaatgaaaaacggcgacgtaatcgattactgcgtcgcgttatctttggtgccgcggtggcaggttggttattggtcatgattggctatctttggtggctggctcgtcatccggctaagccacatcagcaaccgattcccatcaaccattcatttgacgtgccaccagtaacaccagcagttgctgagtcattgtgggcacagcggtcgccgaatacggatgctttaacggctgaaattttgcgagcagcagctaatcacgaaataacgattgaaacggttgcgggtcaccgaaaaccggatgtgcggttaacgcaattgaaaccagtgactaactcatttttggctcactgttttgataaaatcgcggttgacgggcagttcatgttaacggatctcaaaaaatacgggaagcgtgataaggctggtcggctgggcaaatggtttagccgctggcagaccgaagtagaccaagacgtggcggtctatcaagacgaaactaattatcggcttcgtaatcaatggctgatggcagcagttgtcgtgagtgttatggggatgattgccacgggtgctgggttattagttagtccgaaggtcgtgaccctgatggtgattccagcgatagtggccgcggtggctttctggattggctggataattcaacggcggcggattgccatcaatactgacgcaggcttggaattacgtaatcagatcaatggactacgccgcatgcttaaggatattgggcactttaatacggcccaagtcggtgatttgattttgtgggaacaaatcttgccatacgccgcggcttttggactaaccaatcaagtgactaagcaattggcgattgattttggtacggaagcattggctacggggatgctcgtgtattacccactcttctatgccaatggtgggctggacttcgatttgtccggtgcaatcaacgatagttttagtggcgccttagatgcctctggaagcgctagttcggcgtcgggtggttcaggaggcttctccggcggtagttctggtggctttggcggtggctccggtggtggtgccttctaacaaagtatcagaaaagacttgtactttgcgggcataatcggtaggctaaggggtagaaaaggcttacatgaaatggatgattagtaatgacgattaaattaatagcaacggatatggatgggacgtttttaaatgatcatggtgattatgaccaggagcggtttgccaacgactatgcagcgctacagcggcgcggtattcagtttgtgattgccagtggtcaccaagcggcggaactagccacgacctttagtgcttaccctgagatgtggttgattggtggtaacggcgcggaactgtggcaacgagaagcgggactcaaagccgcgacgttcagtccccaagcgactcagcaagtgttggcggccctggcaccgtatcctgaattacaagtggcattgtgtggcacccaaacggtccatgtgttggcgcacgcgaacccgcagtttgtagctaatatgcgtgactactattaccaattagagacatgtgcggatttaaccacagttactgatccggttgtgaagttcgacgttatttgtcccgcggcaatgacggaccagttagtatatgaacttacccctaagctcgctggcattgccgtacccgcttcaggtggtcagggcagtatggacttgattcagccgggaatgcacaaaggccgcgccctcaaacagcttggtgaacagttgggtattctgccggatgagatgttagtctttggcgacggcaccaatgatcttgagatgtttcactatgcgacccatgcggttgccatgcaaaacgcgcctgaaaacgtccaagccaatgcgacagcggtgacaggtaccaatgtggacaatggtgtattggattatattgaacaacatattttgagttaactttgtgagaccagtattttgctaacttgagttacttggtgtgcgtgatgatcgtcaggcggggctttggtcgcgcaagccggtttgttgagtcactagacacggttaaaactggtgtttacgggtggggttaatttagattgtttatgaaaataatgagatgctttcagaaaatcacgtatggttttgattgccaaacgagctgaaagcatgctaaaattaagattatataattaacgacacagaggtctggaaggtttgtttaattccgacctcttttctatcggacaatttcactttaaaaaagaagaggtaatggaatgctcaccgtaaataatgttagtatgcagttttcaacacgtaagctttatgaagatgtcaatttgaaattcacgccgggaaactgctacggcgttattggtgccaatggtgctggtaagtcgacgttcttaaaaattttggaaggtaaattacaaccgactactgggacggtctcgatggggcctaacgagcggatgtctagcttgaatcaaaatcactttgctttcgaagatgaagaagtgttagcaactgttattcgtggtcacgaaaagttgtatgaaatcatgattgaaaaagatgcgctgtatgccaagcctgattttagcgatgaagatgggattcgggccgctgaattagaaggcgaatttgccgaaatggatggctggaacgcggagtcggaagcggatcagttgttacaaaaccttggtatcgatgaatcgatgcaacacatgaagatgagcgagttgactgaaccgcaaaaggtgaaagtcttattaggtcaagcgctatttggaagccccgacgtgctattactggatgaaccgacgaacgggttggacgtccaatcaattagctggttggaagactttttggctggttacgaaaagactgtcatcgtcgtttctcatgaccggcattttctaaatcaagtttgtacccacatgtgtgatgtcgactttggcaagatcacactatttgttggaaattatgatttttggatggaatctagccagttagcggccaaattgcaagcgaatgccaatgccaagaaagctgaccaaattaaagagttgcaagaattcgtggcgcgattcagtgccaatgcttcgaaatctaagcaagccacttcacggaagaaacaattggaaaaaattacgttggatgatatcaaaccatcatcacgtaaatatccgttcattaagttcacgccagatcgtgagatcggtaatgaccttgtgaaggtcgagaacgtttccaagtcgattgaaggcgttaagattcttgataatattagctttacgctccgtcctaatgaaaaaacggcgttgatcagccgcaacgacttggcaacgacaacgctgatgcaaattattgctgggtcgatggaaccagatagtggcacggtgacctggggacaaacgacttcgcggacttatttgcctaaagatattaatgaagaatacgcgggtagtgaattgccaattattgattggctacgccagtttgcatcgaaagaagaaagtgacaatactttcttgcgaggtttcctgggtaaaatgttgttctctggtagcgatgttgaacgaccagtgaatgtgctatctggtggtgaaaaagtacggggaatgttatcaaagatgatgcttagtcgggctaacgtcttattattagatgatccgaccaaccatttggacttggaatccattaccgcactgaatgatagtctgattgattttaaaggcgccatcgtctttacttctcatgaccatgaatttattcaaacgattgccgaccacattgtcgaagtgagtgcgaaaggcgttgttgatcgtggtgatacgacttatgatgaatacttggcccatgaagcaacacagggccgggtgcaagatctttactagttagtcgtggaatccgagaaatctaaacaaaatcacgtgtgagcgtccctcaatctggtatgattaatgcatatcagattgggggatttttttatgacgccggaaaccgaacaattattacgacgctggtacatggggcagctcatcgtgttatttggtgcggcctttattcaactatttacgtttgatggtggtgtgtttttcccagttggtggtatgcagttgctgatatggggactgttagcttggtggccagctgccgaggaggatcaagcacagtggtggcgtttgcgacatgttaattattacgtccaaacagtgctgcagttcacactcttgccgattttactggcgaacctcgtggcttggttaagtcagctgtcatggttagacgaacagggactgattgctgtggggatggcttatttaatggtcgcattcgtgccggtggtagtggtggtcactaaaccgatcgaatctgtgattggccggattgcggtcttaattacggctatttttagtggcgtcgtcagtgcgcagcagacttttctgattttaccgaatctgcaagcaccatcagtgttcgagatggtcagtgatactggtattttaggcgccctaggctttgtgattgctgttggggtcttactgtggggatggggattaacgggcccatcgtggcggtttaatcgtcaggctcaaactagtttagtggttgggctgatcgtggtggggacggcttttagtttatggaatgcttttagtgcgggtggttcgtgggcgacgacgttcacacattgggacttccagctacggtcagcgacttggaaaatgtttttgagtgggttagaaccgggaatcgcggaggaatggttgtatcgttttgccgttttgaccttgttattacaagcttttcggcatcggcgtcaccagctcgactgggcagtgtggctaagcggtggcctatttggaatgtggcatattacaaacgtttttgcgggccaacccttgtcagccacggttgagcaaatcatttttgcagcgacgctaggctggtttttagcctcgacgtacctgtactcaggtagtatcttgttaccgatggtgatccatgccgccattgatattttgagcatgatggcatcgggtagccagacgatggttaagccgaatgcgttcgaatggcaaacaatcggtgctactgtcattatttttgttggcataacgatttatttcttgaccggttcccggcgacaagttattcaagcacatgtcaatcaacggcttttagctcaataaagaccgactgttaaggccgtagtggacgactttgttcgttaaagataaactgggtgtccgtaatcagagacgattaagcaatactaggctaacttttagttggtttagaccagttgtaacatttttgtaatcttcgtgttatctaaacgcaatgctggctcgctatactaaaggcagagttatggagcaatacatacgctttgtcagcggatttaggttgggagccggatcgatttactttgtcaggacattgttaataagcaattattgatagtgataagtagctcaattagctgaatcataacgtttgacaagcatttatacctctcgggatgggctgggtccatgacgaggcacatacacaatggcaagcttggggtttgcaagtcgatcagagaaagggacggttggttaccggcccttttattgtggttaaaatttgtggaaattggatttaggaggacgaaatgagaacgctacataaaacgttaacacggttattacaggcagacttgattccgattgcgcatgtttcatttaatgagatgtataccggctatagtcgccgctatgataccgtagtttttgttaaagttttcagtccggattgcgaacgtaaatttagaactgagcagcaagtgacagcgcaactcacagaccgggtcttagccagttttcaattagcaagtcgcgagtgggtgttggtgttgcgagattggcaactaactcctgtaccgacaactttgactccagcgctcgtttaccaaatgggtcaggtagtctccaggtttcaccacgcaattcaacttccaacaaccgcagacctgatgccggttctggatttcgatgggatggtcgcccgggtcgagcggttaaagactagtccccattacgacgcgctggtgtccttattaccatactttctcgaccaccggacgatgattaaaaccgcactagcaccgcaaccagtcatgacactgcatggggacatgggtactcgtaattttcgctaccatcatggtcagcttgttctgattgattttgaacgatcccgtcacgggtacgccctcgaggactgtttgaaattcttttttgaagatcttcaacgatcttcaacgttgattcaagctttttgggctggttatgggacagacttacaaataccaccattagtgacacagtggttactgttacaatgtagtactgggatatttacgtacgttaatcagattactgacccccgatttgaagcggtaggaactgcgatgctggcacaggtaactttgccaaatcattgagagtggaacgaaataatttacatttgccagtagattattataattaacgaatcaataataatttggagatggcaatttgactcagtttgaaacggaacggttgatattacgaccaatgacagcggcggatcatgatgcgttagcggacatgatttttgatccgcaggttgtcgcttatttacgttaccgacgggttcagagtccggccacgttcgagcaactgtttacgacgcactttttggcagacacgaccactgtttttggcattgaacgtcgccgtgatcatcaactaattgggttttatgagtttcatggtagtggtgcgactggtgaattgacgtacgctttaagcccagctgcgtgggggcacggttatgttgcggaagccggcaattgtttgatgcattatgggtttgaaacgctgaactatgagaccatcgaggctcactatgcgagtgccaaccctaattctggccgagtgatggctaagatgggcatgcaagcggctggagaactgcacacgtttaccagtgataaaggtgaagtgatccacgtcatgcggtacttactgaccaaagcaacctggcgccaacttagtgcttgacctgaaacgcgtttcagcagctatactaaaattgttgcgacagcttgcaacacacgcttaagacttatgatcaccattctttcagccagaatggtggttttttaggctgttgttgtccctaagtgatctaaagtcaaggatggccagcttcggtccgctgggaaaggggccgtttaatgtaagtttatatgtccacgaatgtgattgttgttagggcgggttttcgatatagtagacctatgaattgagagggcgtgatcaaatgacggcaacaattacaattcgaccgcttcagcgcgcagaattaacaacgctatggcaactaggttttagtgatctagatgcggagtggacgcgctggaatggaccgtattttcatgaccaactaccgactcaaacagactttgagacaattattggcccccgtgattggctgattcgaccgcgtaactgggtcatcacacgggatggtgtgattgtcggcagtgttaattggcactttgtggatggttccctcaaacgctggttagaggtaggcatcattatctatgatcaggagcattggggtgagcatattgggcgcaccgcgttgactaaatggttgacccacttattccaagaggagacgactttgccgcacattggattgacaacgtggtcggggaatacgcggatgatgcggttagcggaagccgtgggattaaagcaggaggcccggattccacaagttcgttattggcaagggcagtattatgactcgattaagtatggggttctaaggaatgactggcaagtacaaaaagattaaaagaaaacgtttgttccccttgtgaaagtacggtatgatagaaccgtacttaaaaagacggggtggaagagaatcatggtgaaattaatgcgacgcgttggcatagcgggtctcttgagtttgagcttactgttgggtggttgtagcttgttaacgtctggtacggatacaacgagttcgacgactagtcagcagtctgaatccagtcgtaatcaaacgaccagtgcgactggtaatacgcaacaaacttacaaacaactggcaaaaatgacttatcaatcgggcagtgctgcggccatcaaagttaatagcggtaagagtacgctggcagcgagtcagtggaaaaattctaagattgattacggtaatttagattcattgaatcggacaaccacggacacggcttatttgagtaaggccaatttaggacggtctgaaggacggacggcgcaaacgtggagcccaactggctggcataatcaaccgattaccgttaatggtaagcgggtctatccgcaaaatcgcgggcacttgattgcttacacgttatcctttaacttgacgtctaatgggcagtatcgcgctggtgaagatggtagcttagataacccgaaaaacttggcaactcagacggcctactcgaatcaaaaaacgatgcagatttatgaagatcaggtgcgcacggcgttagaacaaggtaaaaaagtcatttatcgtgtgacgacggttttccgtggcaacgaattgatgcctcgtggttactggtcgcaagcagtttcaaccgatggcagtgtcaatttcaatgtctatatttggaacgttgaacctggcgttagtttcgactatgctactggtcgcgggaaagcggattcgacgatgcaggttgctggggctgataaagtcagcagtagtcagaatacgagtcgctcgtctcaatcgacgaccactagtaagcaagtcgagcgcgagttggttaagtatggttacaaatatgtgaagaaggcgttgaattaagcggcaagacagtcatctagttcagcataatgggcacggtcggctgttaaacgtcgttgtttcatacaacaatttaatctaaatgtcctgttttacgacaaaaggttcaaagctaggactagcaaagtttcactgagcgattatactgtagttattcgagttacttaaccgccgttaatttgctgatgtttctgtcattattaacaagtaacgcgatgtcttagatcatggggccttcccaaacacctatgattttccatacaacggctccggctcccaaccggacgttgctatcaatcgttttgattgctagtactaattacccttggagacgtctgactgcgtggtcaggcgtctttttttgcgtcaaatgcgacaaaaataataatttgtcgcgtttatcgacaaagtgtatttaggtgttgcaaacggattcaaaaagctttatcattgatacattcgaacattagaatataagaatataggaggctaatcgcatggtcagtagtgaagaagcactgcaagaatttcgagaaacaattccgatctttgaagtcttagccgatgaacggcgtcaacaaatcatgattgaactttcgcaacacgcgcagggcatgactgttggtgaattaactgaacggatgcatatttcgcaaccggccgtttcgcatcaattgaagacgttaaaggaacgacactttgtcgcagttgaacatcaggggacccgtaactattatcgggtgacgtttgacgcgccactaacgcaagttgagcatttgattcacacgcttaaggcggacttggaattgaaaccgtacttgcactaaactgcatgaacaccagcaatcgttgcacggggatgcagcggtgtttttatggtaactatattcttctattcgaatataagaatttaaaaacggggtgatggtaatttcaattcgtacggagctggatttacagcggacgatgtaccaattgttggagcaacgttcaatctcacaaattacggttgagcagatctgtaagcaagcatttatacatcgcagtagtttttatcgttattatacggataaatttgatttgctcaggcagatggtgatgcacacgttagatgaactattggctgctgagcgaactgatacggttggttcggcaattatgtcgacgtttatcggggcgcacacgcaagttttacgacatttattagtgacgaacaatgagggtgacaatacccgttctcaacaagtgatcaatgactgttttgtcacggtcgccgagacgggagcggatgatcgggtttttgcgatgattcgccagtcgcagcatcccgatttgacggcgtacttagtcagtggggtcgtcacaagtattgtccagtggctcaataacggtcatcgtgatggtcaggcggccagcacgcaggcgatgattcaggggacgcttgcgacggtgttttcacttgagcaacacacagtttaattatttgaaggaaggtttcaggttgtgaaaatgatacgcgacgaatggcggtcaattcgtcatagcaaaatactatggatttcagtttcagtcatgattttgatcccgtttttatacagcatcttcttcttgaagtcggtgtgggatccatatggggatacgcaaaacttaccagtggctgtcgttaatgaagataagtcagtgaactatcaaggcgaaaagtttgcagttggtaagcaagtcgtgacgaatttaaagaaaaataacgatttagattggcactttgtgtcggctaaaaaagccaagcagggattgaaagaccggaaatattacacggtcgtcacgattcctagcaatttctcaaaaaatgccacaacgatgacggataccaatccgaaaaagatgaacttgcattatgagacgaacgaatcgttgaattatattgctaaagtcattaccgatactggtgtttcacgagttaataagagtattcgggcgcaagtcactaaggcctacgcattagcaattttcaagcagattcggactgccggtaaaggctatcaaaaagccgccgatggggctaccaagcttaaagatggtggcgtcgaactgcaggatggcttgacgacgtatacgacgggtgttcatacgttgaagaacgggacgactgagctgaatacgaaagtgcagcaattacctgctgggattgctaagcttgctgatggtggtagtgcgttgaagaccggtctggatacgttgaatagtaagaccggggcgttagccagtggtgttagtcagttatcagatggttccgggcaggttactagtgggcttggaacgttgaatggtaagactggtgcgttggctagtggcgtcagtcagttgaaagatggttccagtcaagtcacaactgggctgactacgttgcaaggaaaagtcgtcccaatggtgagtggtgtcagtcaattgacaaacggctcagctcaagtttctaatggtctacaacaacttgactcaaaattaccgacaatgcagattggatcgcagtcgattaccgaaggattgttaacattaggcaataaagccgggacattagctggtgctgttaatttgttgacagatggttcaggcaaggtcacgactggactaaagaatttgaatgacaaaaccgggacaatcagtaatgcaacgggacagttagcagatggatcccaaaaggtcaaagtcggagttgccacatatactgatggtgtttatcagctgacgactggtttaactaaattagatggtcaaactggaaaattgtctagtagtgtttcgcaactttctgatggctcaacagaattggctagcggagttgcagattatacagcgggtgttggtaccgccaatgatggtgccagcctattgaaatcaaatactactaatttgagcagttctgttaacgatttaacaaccggtgcgcaaacagtcaatgccggtgttagcgatttacaaacaaatagtgcgaaaatttctgatggactggatcaattgtcagccgcagtaaatgattcagcgactaagacaaaaatcgaaactttgaagacagaaatggcacaatttgaacaggcattggcagctagtcaaaaagaaattgctgctaacacgaagagtagtaataataacgatgctttaaataccgcgttaaaatccttatcaagtaacgtggatgctttaagtacttccaagtcgccaacgcaagctgatattacgtcacaaatcaatagtaaaatagatggtttaaagtcgtcacagaatttaactgatacccaggttgcggcaattaaggaaagtctaaaagatgttggacaaagcacgacgactactactaatgcgcaacaagttcaaaatttgcagagcagcctatcaaaggtagagtcattagttgcggagaacacctcggcaacaagtaattctaatgctgacttagtaaccgagtacggaaagattgaagctgggatgaataccattatttcagacattagttccacgacttcaggaattagtcaacttgccagtggctcagaacaattaaccactgggctgaagaagctgcaaagtgggactgatggtttaagcaatggattgacagaattaaatatgaaagtccctggattagttagtgggattgagtcgttatcaacaggtacaagtaaattggcttcacagtcagctctgcttaataaaggtgctaataatttgagtactggactcaccacacttaatggcgcggttccagaaattactggcgcaataggccaattgagtaatggtagtcagcaattgaatgctaattcaaatgatctgaaccaaggtaccacacaactggcgactggtgctgcgcaactgaatggtggaattccaacattggtttcaggtgtcgagcagttgtttagtggttcccaaacggtcacgggtggattgaagacagtcaacggcagtgttcccgcaatgattaccggtataaataaattgagtactggttctcaaaccctcactaatggtattaacacagcacaagggggagttagtcaattactagttggttctaacaaaattacgactgggttggtaactatgaatggcaaagtccctgagttagtcagtggtgtccaacagttgcaagttggctctggcaaggtaacaactggtttagttaaccttaatggacaagtgccagttctggctagtggtgttcaacaactctttgccggttcaagtaaggtcacaaatggtttagtaacgttaaacggtcaagtaccagtcctagtaagtggtatccaacaacttgacaccggtgccggtcaactaaacagtggtttacaaaccttacaaggtagtaccggtcaattaacgagtggtgtcagtcaattaaatgacggggccacccagcttgacaacaactctgccaaactcctatccgggacaaagcagatcaagaacggtaacaagacactcgcgacttccttacaagaaggtgctgatcaagttaacgcgacaccattaaagaacgcgaatgcgaaaatgatggcggcgccaactaagacgtcctataaagactacacgcacgtgccaaactatggtcatgcgttagcaccttacgtcttgtcactggccttgtatgttggggcaatcgtcttcaacttcgcttatccaattcgacggattgcggatgacgacggcacgccaacacaatggttctggagtaaagttgccgttggtggtcccgtagcacttgcgatggcggtcatcgaagcgacagtgttattagttgctggtttgaaaccaatcagtgtacctgaatactacttgacggcaatcatgattgccttagcgtcaatgttcctagtcatgttcttatcgatgctattcgataacccaggacggttcgtcgcaatggttatcttgatgctacaacttggtggttctggtgggaccttcccgatggaaattaccaacaagttcttcaacgttattcacccatacttgccattaacgtactcgattcaagcgttccggcaagccttaactggtggttggggtagtggtattttctggtcatcaatcgttgtcttagcaggaattacgattgtgtcgctgggattactgtgggcttccatggtcttcctcaagcaacacgatatgcaagttccagccgaggctgaaattcagatgaaagctggtaagtaattactggtaatcatattatcgcgcttccaagacgaaaaaccgcgtcttgggggcgcggtttttttctcgaaaagggttaaattttaattttactgataccataattcgaagacattacttttttctacgagtgagcgcaactaatgaataactaggcacatctaatcgcgtaccaggccaattgtgcggcgataaacccgactccgatgctatctccaaggtatctgattagtaatttagccgctgccttccacgcctttctttggattaatccttgaatgcctccgcgtaataatgcttggaaagtttggtagccaatcatgtccaataattgatttttcatacaggaccaaaaacttctagtttgaatactatttagcttgccttggttgaattgcaaatttcgcttgtattcatatttcattatctcgttgatatgctgcaattggttctggttattggaaccgtattttgatactaaagcgttcacatctaagtttgttgctaatccagtctggggatcataccgaatgctatttgatacatctgctaattcttgagcgatacaatctatggcttgttgtgacgatgacgtcgtattggcagaaattttcaaagttatggtagtagatattaggatactgctcaataaaataatgatcaaagtaaatttgtgaatgttagcttgactggtataattcattggacttcctccttattccggtagtgtacatttttgaattgcgtatgtataataagacaaaacgaaaccggtttcaatagatgggagtaggatatgatggctgtttttaaatcaagtttcaaacaaagcatgattgtttttggaatatcagttatttatttttttgttttacatggtggatatgatcttctcacacaatacaaatattggtttacagaatactgtgctaatgttttgggtatttccattatttattttgtaatgtcactagttttcaattatagcatcataatatggaaactctattttagaaagcattgagatagtaatctgcttaatagtgtgtttactgacgctagagtacgcaaaaaggcccaggtcaaagaaaacctgagccttttcgatgtagatttaaagcatttaaataattaatctccaaaaatgcagcaatcaatccactttcaatacactttgacgttatggtgattcattcaccaatgctagaaatattgatctgagcgatatgtaatcgttcttgaataatcatatcagtaatttagtagaattatcttgggacatattggacacatgctttcaattggttgtgatcagcttggttgcagcatggcgcaatatgtccttttatcatacataaaaatggtgtcgatggataaaattcatcaatattttaaagctaaatatctgaaaaaatagatgacatatgattatcctatgctatcatataaggacaaagtataataccggtaaaaattggggaacgtattatgaaaaggggtagtttaactgtgttacgtgcactatcgttatcggctgtagggctgattgtgtcaatttttttccatgttgtaaatgccaactcgagtacttttacagagcaaagcgttacaactgaacaaaacgtgatttatgacaaagatggcaatcaggttccgctatttgatgcatcatctcaagaaccagttatcgaagaccggggcccgaaacaaccaacagccgtcaagcgattgggtaaagggcaatcttgccaagtaaataaattttctggttcaagaatacgctatggcagatatatgggtggtgtaactggaaacgctaagaacgttagcttttcagaaaaaaagggtgcttttacagggtacattactgatcgtcctgatctaagcactgtggcacagtattttacagcaactccaagtggcggtccttaccacgccgccttccatggtcttctttactttgaggctgacaatccagtacctggtccaaactattttatgcaagttcactaaaaccgtaataatttgcccgcaacggtataaagccgactatgcagtcagctttatgtatttatccaatacgcgttgtgctagttactttgtcatgaaacaattatgacagctgactttttccggttgttatctgaaagtattaaaatcggtgctaatgtcttgccagtggctaagcctaagtttgacgatttgctgaatgactagaataacctatctagaaaataatagtcgattgctgcattcggagttgttcaggtgttaaaaaggtaactgccaaaacgaaaatgttgtgcggttggtattagtgaagttaggcgttagttggtaaatggttttttatatggtacaagaaaggctcgggtacgctaacccgggcctttttggtatagtttcaaagtattaaagaattaatctccaaaaatgcagcaatcaatccacttgcaagactaacgttgctaccagtcaatcctagttttgccctgcttcaagtcgtttaacatgcaaaacactaaccaaaatggcgatcgccaacacgaataatagcaagaaatccaacttgctccccataatcgttccagttacggtggaatgatgaatttcatagccggcaattacagcggacataatactggtcccgattgaaccggcgtattgttgcatcatactgaacatcgagttttgatcggatttttgaggcagagggacgcgggtgctaccatccgaaatcgcagtcccaaaaccagtattaaagccgacgcgtagtagcgcgtaaatgacagccatgatgatgactgtgaaataatcggttgtcagccagaataatagtaaggcggcgctcgccatgatggcactaaatgttaataaggtcgttgggccttgtttatcgtaaattcgaccggcgattggcccagtgatggcgccgacgattgcgccgggaagcatcatgagccccgccgtcatggccgaagccccaaggacggtttgggcgaaaagtggcaggacgaacgataacccgatattaatgaattgtaaaccaaagtaattaaatagccgaagtcgcaagattggcaatttgagaattgaataatcaatcagttggcgacgccccttgatggcgtacgtcaccattgcaccaatcatcacgatgctccacagacaccagaggccgaagttcggcgacagccagccgtgagttcccgcgttgttaaacgtgaacaacagactagtgaaggtgatggctaaaaggattgcgcccagatagtcgaattttttatcgccaacacctaaggccttccccgaaatgttgaacgcccctaagattgccagtaatgccaataacggtacgataccaacgaaaattgcccgccatgaccagacgctagttaaaatcccgccataagttggtccgagagccggggctagagacacgatgacactagctaaaccggtataagttcctagttgattgcgagggacgtaagtgaaaatcaactggaacatcagtggaatcgaaatcccagtggctacggcctgtaaaaggcggccagttaataatacggagaaattcggcgctaaccaacaaagaatgcccccaagcagacacacgagggcggcaaataagaataagggcttggggttaaaccgctttagaacataggccgtggtactcatgacaatggttgtcagtaataggtaaccggtcgtcagccactggacggtatctagtgaaacccccattgttttaatcagcgtggggaacgtcacattcatcgatgtttccacgagaatcccgacaaatgagagtaaaccaacggataagattgccagtttggtttttaaagtgacggtacttggttgggacacaatcaacactccttataaaaataattggcgtattttggacagctcaccaagcccaatagtcggtggtaaaaatcagtaatctgaatttttgcgattgaaagggacgatcgtaatgaccgtcccactaacgtccccagtctaagcttattttcaatctggtgcaatcactttgcattagggatggaacttatcattaaggggtttgcgcgaggtatggtattataaaaagttgtctaattaaattttaattaaattattggaggtgcgctgtgagtatatttttgaaattaggctggtattttcggcgtgaatggaagttgtacctcgcgggggtgcttggactagttttgactgccattatcggcattgtgccgccccggattattggggacatcgttgatgggattaatcagcacagcttgacggcgcacacgctgacggtctatttagttattattggtgtggccgccgttggtcagtacctggcgcgttatttatggcggaatgccatctggggtggtgcagccggccttgaacgaacgctgcgggaacgactcttttggcattttatgaagatggatgcgacgttttatcagcaataccgtaccggggacttgatggctcatgcgaccaatgatctcacggcggttgaacgggtcgctggtggtggcattctccaatttgcggattccattattactggtgggacaacgctgattgcgatgatgacactaatcgactggcgactgacgctgattgcggtggtacctttcccattattagcggtcgtgtcacggtatttgggtaaaaaaattcacgtcgcgtttcgtgcctcccaagccgccttttcgcgactgaataataaggcgcaggagagtatcagtggaatcaaagtgatcaaagcgctaggtcaggaaaaggccgatgttgctgattttaatcaacagattgatcagacgattaagatcaatcggcatgtcaacgtactcgactcgctatttgatcccgcgattaccatgattattgcgttatcttacggcgccacaattattttgggcgggttgtacgtgacccacggtgtcatcacaatcggtaacttggtctcgttcgtcacttatttgggaatgatggtctggccgatgtttgcggtcgggatgttattcaacacgatggaacggggaaacgcctcgtatgatcgggtcatggaattattgaatcagcaaagtgccattattgatgccaaacggggcattgaacagcgcccgcatggtgatattcagtatcaaatcaagcagttcaattatcccaacgatgcaggaaccagtctgagtaacgtggactttactttgaaggcgggacagacgctcggaattgtcggacgggttggtgctggtaaatcaacgattatgaaactgattttgcgtgaatttgatcagtacgagggccacattacttatggtggtcacgatattaagcagtatgcgcttgatagttacttaccagcccttggttatgtgccccaagatagttttctgttctcgaatacgattcgcgaaaatattcgttttgccgatccgactgtgagtcaagccgttgtggaagcggtcgccgccaagagtgatttgagtggtcagattgccagcatgcccgctggttacgatacccaagttggtgaggaaggtatctcgctatctggagggcaacgccaacgactagccattgcgcgggccttactcatcaatcctgaattgctgatcttagatgatgcgttatccgcggttgatgccgaaactgaggcagaaattttagctaatctaaaggcagaacgagcagacaaaacgacgattatcgcggcccaccggttaagttcggtgatgaacgctgatgaaatcattgtgttggatgccggtcacgttgttgaacgagggacccacgcgcaattaatgacgcaacacgggtggtatcagaagatgtttacgcgccaacaattggagaccaaagtggaaggagcggtgcaataatggcagcacgtcaatcggtatgggcacgttccatgcctgttaaggaacaactcacggttattcggcgactattgccgtatgcgaaaccgttcaaatggttttttattgcggccatcgttttttccggtctgattagtgtggttaatatctatctaccgcgtgtattacagacctttattgatcattatctcaaaacaggacacgccacggtaccggtcatgtggtactttgcgggcctctatttcttcggcatggttgtgcgcgcgttgatgcagttcgtacagaacttcagtagtacgatgggggcagaatatatgcttgaaaatgtccgtcgacaaatgttcgccaagttgcatcggatgggcatgcgctactttgatcaagtccctggtggctcaattttgtcacgcctgactaacgatacgatgtcgttttccaatttttgggcgttgtttaatacactatttaccgccttttttgcggtgatttcgtcgtttgtcgcgatgtatctcaccgatgcgcagattgccttgtggttattggttttcatgccttttttggctgtaacgatttggtattatcaacggtatagctcacgggtttaccggcgaatgcgggaacggctcagtgagttgaataccaagttgagtgaagcaattactggaattagtgttattcagcaatttcgacaagaacaccgtatcaatggtgaatttgatcataccaatgatgcctattttaagacccgccaagcgatgatccggacgaactcattattattaagtccactgatcgacttgttttatgcgttagggacggtcatggttctgggaatcttcggggttcgtggactcaatggttatgtggctgccggggtcgtttatgcgttcatcacgtacctgaataacttctataatccgatgacgtcgatgatggataatttgtcagactttcaagatggcgtcgtcgccggatcacgggttttacgggtcatggatgatccaacgattgccccggcccaacacgccgatcctacggctaagattacgcgcggtaagattgaatttcggcacgtcacctttgcctatgacggccagcatccggtcttaaaagacgtttcattcgtggctgaaccaggccaaacggtggcactagttggtcagacggggagtggaaaaacgtcgacgattaatgttttgatgcggttttatgagtttcagtcaggagaagttttaattgatgatcgcgacattcgtgagtatccggctgaggaattgcgacagaagatggggttggtcttgcaagaaccgtttatgttttatggtgatattaattccaacatccgaatgtttaacgatcagatttcagatgaacaagttcaagcagcggcacggtttgtaaaggccgatgacttcatcaacgatttacctgagaattatcagtcacgcgtcattgagcgcggggccagttattcttcaggacagcggcaattgatttcatttgcgcggacgattgtgactgaccctaagattttaatcttggacgaagccacggcgaacgtcgatactgagaccgaagagatgattcagactggtttggatcggattcaggagaaccgcacgacgattgcgattgcccaccgcttgtccacgattcaaaatgctgatttgatcctggtcttaaatcaggggcaaatcgttgaacgcgggtccaacgatgagctattgcaacagcatggttactactatgatatgattcagttgcaaaattccgctcacgtcgattaaagtgtggtatgctcgatttaaattaattgaggtgatgccgaatgcgtcgaaaattatcgttaatggtcgtgatgactgttattagtacgctggttaaagtgggctggcaattaatcttagcgcgccatcaagcgcctaaaaagttaaaaattaaagtaaaactgaaataaacattgtcgtcgtgtcggtagcgatgcttacggcgattcaatcagttgtcatgaccgaccgttctggaaaaggtgtaacttctagaatggtcggttttgtgttgaaaaattgagttggcggaggtggtcgcggtgagttgtggtggtgcccacaaaaccggtttatcagtggttcgtccttaaaatcggtcggtgacactcactgcaggatgtggcctggtatgcttgcaatcgtgctgttcatttttggcccaacacctggagtacggtgccacgcttgaatgtcgccaggcacattgaaaataatgattggtgactaataacggtcattaattcctaaaacgactggatgacggataactatacggaatggttataattgattatttgaactaggtattttactctgccaacggatcgcgttttaataaagatggtaatgagttaacgaagggagttgtgatgcaatgcaatatcgacaattaggaacatccgatttaaaagtctcgtcgatcgcacttgggtgcatgggttttggtgcggggactggaacggcgcttaatcagcgctcgtgggcggttggtcaaacgcaggcgaaccaggtacttgatcgcgcgatatcactggggattaacttttttgatacggcgccggtctatcaagcgggtgcgagtgaacgtgtcttgggacaaggactaaagaaatttcagcgagatcaattggtactggcaaccaagtttacgaatcggacaacccaagaaatcgaaaatcatgtcagtgggcgtgaacatgtcttgcggtccctcgaccagagtctacagaatttacagacagactatgttgatttatatatttatcatatctgggactggttaacaccaatggctgaaatcatggctgggcttaatgaagctgttcaggccggtaaggttcgttacattgggatttctaacgcctattcctggcagattgcgcagatcaatgcgctagcggttcgttatggttatccacaatttgtctcgatccagagtcattataatttggtctatcgcgaggatgaacgggaactgttcagttatgctcatgagaacgatttggcaacgacgccgtatagtccattagctagtggccggttggcacatccttttggcacccagactactcggcgacaacaggatacgtttgctgataccaaataccaagctaccagcgagatggatcaaccaattattgatcgcgttgaggaactggcccaccaacatcatgtttcaatggcggccattaatttggcctggctacaacaacgagtaacggcgccgattattggggcaactaagccgcatcatttagatgcagtggctgaggcagcggggttggcgttaactgcttcggaaatacagtacttggaaaccccttaccaaccccatgacttggagggcgtgatggcacttaaccggtcacgaactaataattggaatcagtattccggacagtaagcgaacaagttagttgacttaacgtgcagttgaagtaatacactgatcctatcgtgcgactaaaggtccacgtttcagtataaaggagttattgagattaaattgaaaacaatcacacaacagtatttaacgggcgagcgggcactctttaaagctcacgaccttgaaatcgacaatacaacgtttgctgatggtgaatcaccactgaaggaaagtcgcgatgtcacgttgaaacagccaatctttaagtggaaatatcccttgtggtacagtcaacatgtgactgtggatcaaggtttgtttgagacaatgtctcgctctggcatctggtacaccaaggatattacgattacgaatagtacgctacaggcacctaagctatttcggcgggccagccaagttaagttagcgcacgttcacttttcagatgcggaagaaacgttatggaactgccaagatattacgttgaatgatgttcaagcagctggtgattattttggaatgaatagccagaatattcgcattgatggcttcaacctcgtcggtaattacgcctttgacggtgctaagaacgttgaaattcatcatgcaacgctgatgaccaaggatgcgctatggaattgtgaaaatgttaccgtttatgattcacaaatcattggtgaatacctgggctggaattcgaagaatattcggttcgtcaactgtacgattgagagcgatcagggcctgtgttacatggataatgttaagttggaaaactgtacgttactcaatacggacttagcttttgaatattgtcgtaacattgacgctgacgtggtttcaacgattgatagcgttaaaaatccgcttagtggtcggattcatgcgcaagccattggtgaaatcatcatggatgatcctgaagtagatcctcatcagaccctgattagtgttgaccatgaaagccgtgcgccccatgccgtttgattttgagaccgtacttaatcggcggcacacgaatgccgttaagtgggacgtcgcggataatgaattgccgatgtgggtcgctgacatggactttgaaacggcaccagttatcaagcaagcgttgataaaacgcgcccagtttggcgtcttcggttacgaagaagtccccacggcttactatgaagccgtggcagactggtgggcaacggaacacaacttccgtccgcaaattgagtggttgatgttctgcaccggcgtcgttccggcgatttcatcaattgttcgtaaaatgacagcgaccggcgataacgtgttagttcaggctccggtttataatatcttctatcattcaattgaaaacaatggccggcataccttgagtagtgacttagtggcacgtggcgcgtcgtacgcgattgattgggacgatttgacgacgaaactagccgatccgttgaccacgatgatgattttgtgcaatccgcagaatccaatcggcatcgtctggtcacgtgcgacgttgcaacgccttggcgagctgtgcttgaaataccatgtgctagtcgttgccgatgagattcattgtgacttgacccttaacggtcacacgtacaccccattttcatcattgactgcgccagtagcacataacagtatcagctgtatctcgccaagcaaaactttcaacgtggcagccttacacgcggcaacgttgattattcccgatgcacacgtccgcgcattagtgagccggggcatcaacaatgatgaattggctgaacccaattcgtttgcgattccagccagcattgcggcctatactgaaggccatgactgggtagccgcattgcgaaccaaactagctgccaatcaacgtcaagttcagacttacttgactgctgagttgccgcaagtcaagttggtggaagcccaagcgacttatctattatggttggatgtgcgtcaagtgacaaccgacagtgcggctttggctgcttttattcgccaacgaaccgggttgtttttatcagcgggagatgtttaccgtggtgatggcaaccgcttcttgcgactgaatgtggcttgtccaacgactaccctgacggatggattggcacgattaaaagctggtattacggcttaccaacaagttcaagcatagttgacgcgtatggggtgcaattccataatgatttcgctatcattaagataagctggtttggtctagatgaccgctgacagtccgtgataacggaccagataagtcggttaattcaaaccattattaaaagatgaggtggaggatagttatgaaaattggaattattggtgccggtacggtcggcacagtattagccaagacctttgcgcgcggtgatcatcaaatcaaattaagtcggcacagtggtgcggctagtttagcaacacggcgcgccgagtttgctgccaatgtggcttttgtagaagttgctgaagccttacaacagccgttagtcattcttgcagtgccgtttgaacaggcgccggcagtattagcgcaggtcgccgattataagcaacggatcgtggtggacgtgacgaaccagtttacggctgactttaagaaaattaagacggccccgttgactggaagtgaagtcattgctcgtgcagctaacaatgcccgggtcattaaagccttcaatacgattccaccggagtttatggatgggcacgttgatgggcctggaaagcgggtcttgttctatgcgggcgatgacattgctgctaagaaagaattcgctgcgctcgtccggccgttgaatttccgccccgttaacttgggcaagcttcggcatggcggcagtgtcatgcaagttggcggtggactaggtaacacacactttgttcagattgaagaatagtggattgtaaaaaggggttcacttttgaaccaaaatagctagtgctgaccttgtaagaaaaggtgtggctagtgtcactttgattgggccgtgcggtgagtatcaattgacaggtgttcctgccaatcgtcgccgcgtggttaaatttgaatcgtattatgggtcatgaagcctgattcttactgtgtcgtaactgtaagaatggggctgcatggctttttttaattgaggttaattattgtttatacggtttgatgaggacaatggtattgatacgagtctagtcaattaactccgcccacttagctacggaaatatccgataggcacaataagaggaacgtgaaaattcttatgtctttacgctattttggttaaataaaagtgtgaacattacctgctttatatcgtatgagatgcagtgtgcccattcaataggctttgcagattatgttaatgaatttcgactatacgcacaatacatattattatatttagccacgggtgttcttagttcccagctatctatatactagatcaagcaatgatactttcaactattatcgaaatttattggaataatgcaggttttccacttacagcgcctgaatttaatctccgctgtcaaagcaggtgcatgggtaataacccttgtctgacctgatgaatcataatagtgttattcttcaggcgtataatcatttattttctaataccaaaagcgttgtgcttcatttcaatgagaaatctagacacaacgttttttattaaatactgctatctaagctaagatacttaggtgacttcagaaaggactttctaaattaatgtcttcatattcgaatgagctgctcatgctgatttctcgatcgatgctattcaaacaagttatcatacttttcgcttatggttgcttgtactatttggtaactcattttatagataaaaaaattcagcataaaaaaaatttcttattgaaattaagcctagttaaactcaaaaaaagaaataagacaaggtgggaaaaaatacgattgataatgcaactgttcttactggcatcgataccggtcttagtctttagtgaactcgtgctaaatactgattaccagtacatgcttttggtttcttctattatgaagtgtgttggtttcatttcttttgtaattgcgtttgtggatagtttgggtccaataaaggagatgcagcagttgattgctggcgcacaaagcagtgatactttagacagtgataaaaaggcgctagcggtgacgagctttaaaaaaattagatggatgctgatattatatcaggtattaaaagtacccttgcttgtaatttttttgagcttaagtgttgattaccggcgcgacggcttcttttcataaaaatttgaatataactcatttttaatcccgttcctttagctattcttctcgcacgttaattgatagcaagcgtcaagtcgattaaatctgaaaatcttatcacctgagaagaaagggcacgttttgacagattacccagatgaactgctattagtattgtttcacggccaaatcttgaattaagcaacgacaactgttttatatgaattacttttcttgctgattcgtcaaatggtctttttgttgattggaaatcaaggtaagcagattattgagttaaaagccgtcgatacaactactccgcataatacctaatatgttacctaatatgttaaatagttcagtttttaagatacgttaggcctgcgcgcagagtttgctgattatttttgcgtttaagctgttaataacagtttttgcagttgcttaaagttatccacagtgtaagttggggcaattgttgtgtcgttatgcacatgctgtggattgtaccagatactaggtaaatgggcggtggccgctcccgcgatgtctgaacgcaggctatcaccaatcatgacggtattcgtggcattcatgtctgggtattggtcatgaatagcgctgaaaaagtgtgggttcggcttggcataaccgatactttcagagatgaagatatgatcaaaatagggcgtcatatgggcacctgccaagcgactgagctgggtgtgtttgataccgttagtgccgacgagtaaggtcagcccagcgttggtcagcgtgcgcaaaagttcgtgggcgccgggaattacctgataactgtgcgctaataattggtcgtattcttgttgaaccgcaggaccgtcaacggtgatgcccagtgtgcctagaaagacttgaaatcgttggtctaacaagctatcacgatcggcaccttgttcgatttgttgccaaacagtttcgttataggcctgatactcactttctgcacggcgaatatcagtgatgccatgatgctgaaagacggctgcgaggttagccgcttcagcgcggtcaaagtcaaggatggtattatcgagatcaaaaattgcgtattgcatggaaccactactttcaataggtttatttaaaccatcatacagcaattttgaatggtgtggtatgcttaaagtatcatacttaaaaggaagttaaacatggaaatcgataatgacccagcgtatcaacaaatgattaatggtgaattgtacttagaatcaccaatcctacagcaacgtcggcgagacgtgcggacgaagttaatgcaatataatcagattgctgacaatgatgaccggaatactaagatgaaaagcctcctacgttcagccggtgaccggttcttcgttgaaccgacctttgaattcagttatggcgtcaacatccgtatcggcaatcatttttatgcgaaccatggggtcacgttatgtgatgaaggactcattacgatcggtaatgattgcaaattcggtcctaaagttggcttgtacacgcctgctcatccattagatccaactgtgcggcggactgaagcggaacggactgcaccgattacgattggtaatgatgtttggattggtggtagtgccgtgatcttacccggagtgacgttgggcaataacgtgattgtgggtgccggggctgtcgtaacgcattcgtttccagataacgtcattgtagtcggtaatccggcgcgtgtcttgaaacaaaatgcaccgcagtcataattgacaattatgctcaaattgatgaaaataagggtgtagtcagattatcagagaatggggagtggagccatatgtcagagatgagtcctaaggaatttaagcacatcttagtcggcgttgatgattcggatgacgcgcagttagcgtttcggtatgccattaaccgggccaagagtgacggtgctaagttaaccatcgtttcaattttggaacaggataatatgaacgtgtatgaagcaatgagcaaagattttgttcatggccaacgcaaggatttggaagaacacgtccagcagtatcagaagttggcccgtgacttcggggtgacggatgttaacgcggtcgttgatgaaggtgaccctggtgaaaccatcgtgaagacggtgattccagcgttgaagcctgacttactagtcattggctcagttgccaagcatggtgttcgtaaatacttcggttcgcaagccgcatatatggcaaaacatgcaccgatttcagtactggtgattcggtagtgataagatgaattttgattgatcaggccttccggttatggagggctttttttgttgtgtcttgagtatcattttccggcgatggtgttgatgatgaataatagtggttgtgtcttgaataccgttgttatcaaagcagtgttcatttgagcaaatcagatgtttgctagcttctatgacttcgtggtaaagtgaccgtgacatgtcgttgggattaactgaaaattaagttgtgatggaaaggtgtgctgatagatggaagtgagtattcgtaagattggcaatgctcagggaatcatttttcccaatgaactgagccttgaagtaggggcacgttatagaattgagcaaagtggtccggcactgattatgacaccaatcaattcggaactttttgctaatccagatgattgggtgggttttcgtgacagtatctcccaagcagaccgtgaatgggaccagttagctgactcctaaaatggttagtgacaggcaattatagtgttagttacttaaagcgcatcagttttttgatggtactagtattctgatgatgttaaataggattgttcagtagggcgctgggcaatccttttttattgaagcgactctttttgagggattgttttaacaaagagtaaaggaggttaagtataacggataaaaaatagtcattgcaccacacgttagtggcgacagtacaaagaggacggcggcttacatttgatttttacaaaaaacaattagagatacaattaatatcagaaaaccaggtctagcggtggccgatttcctgatattgcttttcataagtaaaacttatcaatgtgggctgaatttgaaattggtctaaaagacgtttgcttgtaagatatgacttgtaagttaaggtgaatcaaaacaagtaaagaggtcaatgaatatgaataacgaagtaattgtgcttttcggtgccggctcaattggtgaagcaattgttcgacgtgttgctgccggtagaaatttattgttggcagactataatgaagcaaaattagttgaaatgaaacaacacttgacggaagctggatttaacgttaagaccatccaagcggatctttcatcacgggaatctattaagacagtggttgctaaggcacaatcgcttggtaagattatgggattggtcaacgcggctggcgtttcaccatcccaagcgagcccagagcaagtgctcaaagtggacctttacgggactgccgttttgttagaagaatttggtcaagtcatggctcccggtagtgcgggaatcgtcatttcgtcccaatcaggacaccgattacccgccttatcacaagcagataatcaagccttggctatgacaccgactgaagaattattggatttaccaattttacaaccggacgtgatcaaggattcattggcggcttatcaatatgcgaaacgaaccaatgttttacgggtcgctgccgaatcggttaagtggcaagctcgcagtgcacggatcaacacgatcagccccggtattatcatgacaccattagccgttgacgaattgaacgggccgcgtggtgcgggttacaaaaagatgttcgagtcaatggttacgaagcgtccaggaacacccgatgaaattgccaatttggcggaactcttaatggatcgccgtggtgcctttatcacagggagtgatttcttggttgatggcggaattaccgcacaatattggtatggtaatgtttcagaagttcgtaacaatggcgtccagaaatagaattttaaggagagtttattatgaaagcagcaacttttattgaaccaggaaaagtcgaagttaaagaatacgacaaaccaactattcaaaagccaaccgatgcaattattcgggtgctccgggcctgtgtatgtgggtcggatttgtggtggttccgcgggatttcacaacgccaagcaggttcaaccgttggtcatgaagcaattggaattgttgaatctgttggttcagccgttaaagatgtacaagcaggcgatttcgtgattgcgccgttcacccatggttgtgggcactgtgccgcttgcttagccggttttgatggggattgcttaaaccaagaagctggcggtaacggtggctatcaaggtgaatacttacgctttaccaatgcaaactgggcgttagttaagattcctgggcaacccgaagattattctgacgacatgctgaacaactttttagccttagctgacgtgatggcaacgggtttccacgccgcaactagcgcagaagtcaaaaaggatgataccgttgttgtgatgggtgatggtgccgttggtttgagcggggttctttccgcaaaattgcttggcgctaagcggatcatcgcaatgagtcgccatgaagatcggcaaaagttagcaaaagcatttggcgccacggacattatcgctgaacgtggtgatgaagcagttgccaaagtgatggctttgaccgaaactggggctgacgcggtacttgaatgtgtaggtactgaacaatccgttgacacagcagtcaaagtcggccgtcctggtgcggttgttggtcgcgttggggtcccacaaaaggctgaaatgaataccaataatcttttttggaagaacattggcttacgtggtgggattgctgctgtaacgacggatgacaagcaagttttgttagatgctgttttgacggggaaaattcagcccggccaagtctttacgaaacggtttatgttagatgatattcaagctgcgtacgaagcaatggaccaacggacggcgattaagtcattggtcattgtcagtgataaataggaggaaaatatgaagaaagttttaattattggtgcaacggggactattggcggtgtagttcgacaaacgcttttgaatgaaaccgataatcagttaacgttgtttgctagaagtgccaatcgattaaagactagtgagcgtgaaagtgttatcgctggcgatgttactaaagatagtgacttagacaaggcgattgcaggacaagacgttgtttttgttgccttgagtggttctttaggtcgctttgcccaaaaaattgttgcggcaatggaccggaataaggtttcacgattgctgtttattacttcaatgggtatttatgatgaaattcccgcttcggttggtgctagtggaaatttaagtagtaatccaatgctacgcacttatcgggaagccgccgatgttgttgaagcttctgatttgaactacaccctgattcgtccgggctggtttactggtggtcctgttgattatgaaatcacgaaaaaaggcgaaccatttggtgggcatgatgtctcaatcaattcaattgcggattttgtcaagaatgcgattgtcgataatgattattatgcacatgatagtgttggactaaatgcaaaataatattcaaaaggtcattggctagattgctagtggcttttttcgtttataagcatggtagggaatcggttcaggttctgctgaaaaacatttctcaaattgttgattaaggttatactaattaaaataatatgacaaatttgaacattcaaagataattttgtaaaggttgaggtgccattaatgtttcaacagatgcagtattttatcgcaatcgttaataatcatagttttactcaagcggccgtggactgccacatttcgcagtcagcgatttctcagcaaatgaaggagctagaaagtcaacttggtgtgaagttattgaatcggaaaggacgcagctttgaagttactgaagcgggtcaatacttttatagtcatagtcaggatattttggtggatgtggaccaacttataaagaaaaccatcaaaattgaaaagaatgatgaggtcgagttgcgggttggctatttaagaagttttgggactgccgagtttttacaaactgtttcgaagtttactcaggagtttcctaaagtgaaaatcaaaattagtagtggcacgcacgaagaactctatgaattattacagacaggaaaaattgatttgaatttttctgatcaacggcgggccttatccaatgaatatcaaaatgaatttttgaccgctagtgagtttatggttgccgttaacaattcgttgccagttgaggcacaaaaaatcgacgttgctgacttagtggatattccttgtattttgatcattgatggcaatcagcaagtctcagaaaaggagtactatcgcaatgttttaggtgtcaaaagtgagtttgtgattgctaaaagctatgacgaggcacaaatgttgatcgcgtctaatcaggggtatttgatcatcaatcagcggatgagaacacaattagataaagatattgttaaaatgatttccttggttaaaggggaccgaaaattgattcagaactattacgcttattggcaagctaataattcaggttattatatcgaaacttttgctgaattattgaaacaaacctttgcataatttttacttatgaatgacccttgatttctgaatggttttggcatagaaaagttggtatcatgcttgatgtaaataaagaaagcgtggtaagaatgacggataaagaaataattattaaattgtatcgtgatgaaaatattgctatggttcagaaaaacctcagtcggttaaatgaaattttggcaccaactatgaagttaacccacatgacggggtatgtgcagtctaaattagagtggattgaccaaattcaaaatgaagaaatgcaatattttgcttcaaaagaagataccatcaaagctattcaaattgaaggtaaccgggcaagtttaattggtcagaaccaagttcaggcaagaatttggggtgggggtacgcatacttggcggttgcagatgcagatgttttatgagaagaagaatggtgattgggtcattagtgcgcagaaagccagtacctactaaagcgactagtgattagtggtcagtaaaacggacgcattaggaaaatagtatttgttggcttggctagactgtcaactaaaggcaacacgcctgtgctttgtgacaattcctgaatagaatatattaagcgaaccataatacctttaatttctgatgactgtggcatataacaattatggtgattaagaccaatgttcgatattatacatctaacgctactaatgaagagaaatacacaatgatggtgttaagcttaccatcaaaagacgtgtggtgacttgatgagtattcagcatggcgattttcgctaattctcggttagccaaaatgaacgagctgttgccgcacaataattaaggtcgggataaggatgcacatctgattcttatcctgattttttgtttgccagctatatgttttaaaatgatagttgtttcattcttgattacaattctactcaaattcatattaaacaagtcctagagtccgtttgtccggccaagtttttatgctaaaatagttgaataatctaaaaaaactaacggagaattaaccatgaaatcaatcaccttacacttagtcgttgctggagcaacgtactttaatcaacttgaccggttccagggttggagcggcacgccgttgacggcgactggcgagcaggcgacggccaaggttgcgcagcagttggcgtcgacaacgtttgataccgccttcgctagtgatacgagtcgggcgattcagactgcgcgcattatcttagactcacgagcacaacccgttaagttacgaacggtagtcgcgttacgtgcgccattctatggcggttttgaaggaactgaacgcgcggcggtttggtcagggtttgcgactaagttgggttatcagagcgtggccgcttttgctgcggatcagacccccagtgagttacagacattgttgcacgatcacgatgcggatggattggcggaaagtggccaggagttctgggatcgctatcagaaggggctacaacaggttatgacggcaacgcctgatcatggtcaggtcttgttggttgtggacggcgcaacgttgcgaatgatgcattacgtcgcaactggtcgtgcggcaacgagacaggcattggcaccaagtgtggtgacaacgatggtttacactggggataagttgattgtaccggtcacggaataagttatccactgtggacaactagcggcttgcggtttatacaaaagtgcgctactgtgaaaattgagtttaaaaattttaacgaggagcttttaaaatgcaagttaatgttattacgagtacggtggccggccaagagacggtcgcaactgcggatgtgcaagctttcatggccgccatggaaaaacaattgggcgcagatttcaacttcacgttagatacagattatggtcagagtttgacggaccatagcgcggacgtttacctagtttattttggctcccaagcgaacttatccccagaacaacggtcccaaatgatcatcttctattccgatgaagatgtggctaacttaacaatcggacgttttgtggatatgctacaacagttaaacaagcagtaggcactgcgttaatcacaagttaggaagtggccccatgcaattactgattttaggtgttattgcaattgttatctttatcttagaagagtacctgtttacggctagtcgctacttttgggtcggcggtatcgttccggttttatggacggtttttttggcgtaccttgtcgtggtcaatgccatgaacttaacggtgcgcgagtatgctttagcaattattgcggtcatcattccttatgtttgttggggtaacggctatcagcggcatcaaaggcggcagtcatgaaaatccaacccctagcggcagctcaaattccacgggatttactgttattagccgatccatcttgggcacaggtcacagcgtacttatcgacaggccaatgttatggttatcaacaaaatggacaagtggtgggtgttgtcgtgttgacaacgttcaaaacaggggtgtgggaagttaaaaatattgcggtggcgcccgcctatcaacatcgcggcattgctaaggccctactagcaacggcgattgcggtctgccaagcagcgccaacctgtgatgaactgcaaattggcactggtaattcatcgttgcggcaactagcgatttatcaacacgctggttttgagatgattgcggtgtgggtcaacttttttgtggataactatccagacccgatctatgaagctggcttgcagtgtaaaagtatggtgcgattgagtatgtcaacaaccggggaggtggcacaacgtgtggaaaacgagtcatttactaattagttggttttacggtgcaatcgccgtcttcattatcatgttttttacggcccgtcaggaagtcaatcggatcgtgttagaatttaatccgttcgtcatttacagtattatttgtgcgctcgtgctgtttccaattgtgaagtatcgttggccgcgggtgtttcaagtctggcgtaaacaacccaaggaaacaccgtcaacgcgaccagacgatgagcaaatcattcaggactctggccgaccatggtcagtagcagccaagcggacaaagcccaaacccgttccaaccgcattaacgccacaagtcgaggctaagagtgacttcatggatggttttatcaacttctttaagaatattttgatggcagtgattttggttcctttaagcccgattatttgtgggtattttggggtccgggattggcgtcagcgccaaaagtagtcgaaactgataatctgttcaggaaactgatcaaatgagtggaagacttatgcagatactgttgataacgacattgagttatcaactgtggataaaagtctggttaacgaaaaaaacgaatcaacaagttgttcataactttgttgattcgttttttttgttagttttgaaaatgattgatgtattgttgccgattctgcctaatgacgccaatgatcttacatcggcaataaatgaggacaatgtaaatacaaacgagtcatttgtataataaaaaagcaagtcgcagttaacgacttgctgataaggtgttcaaatcttaaggttggtagttattaatatattgtttgcggttctgccatggccatgctttgacgaccccaatcatcttgctcttaggaacgagcccccagtaacggccatcgttagaaacgctccggtgatcaccaaggacaaagtagtaacccttcggcaccgtattgttggtcacggacttggcccagccttgatcatggctcaaactattgagtgtccaaccagtgaacttgctgtgactattagccatgaaggacccagtcgtctgttgatacttatttttgagataggtttgcttgactaatttgttgttcacgtaaagtttaccggaacttgtgtagcggaccgtatccccaggcatcccaatgacccgcttaacataaacggcgtttttgtcggtttggttcggatcgagtccgtaggcgttgaagacgacgacagaacctgctttgattttgctagtcttaaaagctacgacgcgttcgttattttgtaaattcggttgcatcgaagtcccatcgactttgaccatagtaaaccagaactgacgaatcagtaaggcgatgatcaagccaatcgcaatcgggaccacccagctcataatgcttttaaatgttttcaatggttaaaactcccttaattgtgtgtatacctctcattataaacgataatgattttttcgcagtataaaaaagcttaaaagttcaacgatactcaaaatgggggcggttgctttcgagaatgcgtgttcatggtgataattgcgtgctatgctggtgaaagtaaaatgcgattgatgggaggaactgggagtatgaaaacacagaaagaacgaatgctggcgggtgagttgtacgttgctgatgatccagaattaggacgtgaaaatcatcgtgccaaacggttagtacgggaatttaatcaaacaaccgaagcccaaccagaagaacggcaacgattgttaacggcaatgttcaacaaaattggtgacgggggctatatcgaaccgccatttcataccgactatggaagcaacacgacaattggcaagcacttttacgccaattacgatgcgatttttattgatgtgggtcggattacgattggggacaacgtctttatggggccgcgggtcggcttatatacggcgggtcaccccattgacgccgccattcgtgctgaacaactcgaatatggttggccaattacgattggacacgatgtttggtttgggggcaacgtggtcgttaatccgggtgtcacgattgggagtaatgtcgtgattgggtctggttccgtggttactcatgatatcccggataacgtggttgcggtcggcaatccttgccatgtcttacgagaaatcaccaccgctgaccatgaatattgggctcggcaacgggccgcctattttgctgatcgtgatgatgattgatagaaattaattgtactgtgttcatgtcattaaagtttggattagaaataaggccgcgatatttttaataatagacattacaccccctcagccttaaaattaacttagaaacaggataagaaagaggcggtaagtgcaatgctaaaagatgatcagatcgtgtgggcaattcaccaaatggaagcagacatcggaccagtgggaccttccctggactcgcggacgccgtttcagtatttgatttcagtaattctgagcgctcaggcgaccgacgtctcggttaacaaggtgacgccggtactgtttgagaagtatccagaaccaaaggacttgatggctgccgatgttgcggatgtggaagcaattatcaagagcgtcggattatttcataataaggctcgcaacatcattaaaacggcgcgcattgtccatgaagaattagccgatgtcgtgcctaccgatcgtaaaggcatcatggcgttaccaggtgcgggccgcaaaactgccaacgtggtattgagtgacgtttttgaacaaccgacgtttgctgtcgatacacacgtctcggcaatctcgaaacgcttgcactttgtcgctcagaccgcgacgccgttacaagttgaacaaaaaatcgtgagtgtgttggcaccggcagaattacatcaagcccatcacacgatgattgaatatgggcggaagtattcgatgaagttgacgccagacaaagaagtttgtcaattgatcattgactgtgacaagttgaatgaggaaaatgaagcgttgatctagtagcgtggggcgacagcgagcatattttagccattggtagaactgcctgtaagtcttgctagacgtgtaatcaaagccaggttacgctaaacaacctcttttccgacaggccgaagttggctgcccttgatcttaactggcagtcctatttttaacataatacgtactgatgcgagcattaagacgagtggtggtcttgatgttcgcgttttttagtttgttcacggtcgtgtttttcgatgcgtctgaaaaataggctattcagaaagtaagtaaaaccgaacataaaaacaattagcattaaaacagtcgcaatggcttgggcaatcatagttggacctcctcggataacgggtgataacactggaattatcagtgtcagtgactgttgtcattgtacgggcaatgcgaggcaaaatgcaagcggtggcttaaatgctaaccgtgaatcttgaaaatacggtatgataatagtaaccgattacatataggaggctaaattatggcatacatcgaagtgcagcaggcaacgcgccagtttaaaaatggtgagcaggtcaccgttgctaatcgtgatatttcatttgaagttgaccagggtgcggtcgttgtgattttaggtccgagtggtgcgggtaagtccacgttactcaatattttaggtggcatggacagccctacgagcggccgtgtgctggtggatggtgtggacattgcgcaatttaactcacggcaattaacgacctatcgtcggcaagcggtcgggttcgtttttcaattctacaacctggttccgaacttgacggcgcgtgaaaacgtcgagttggcgtcgcaaatcaccaaggacgcacgcgacgttgatgagacgttggccttggtaggactgacgcaccgggcagataactttccagcccagttgtccggtggtgaacaacagcgggtcgcaattgcgcgggcagttgcgaagaatcccaaattattactctgtgatgaacccactggcgcgctcgactatcagacggggaagcaagtcttacaggtgattcaagatgcggctaagcagacgcagacaacggtcatcattgtgacgcataatagtgcgattgcgcagctgggtgaccaagtcattcgtatcaatgatgctcaagtgcagtcggttgagcataatgctcatccaacgcctttggctgagattgaatggtaggtgcagcgatgacagcagcttattttaaaacaattatgcgtgagatttggtcgtcgaaagcccgttttgcttcaatattactgatcattttcttaggggttgctttttatacgggaattcgggcgaccggtccggatatgtcacaggcagctaatgattattatgcgaagcaaaagctggcgaccaatagtgtccagtcgacaatggggctgactaaggccgatacacgagtactgaatcaacaccgctcacagctcacttaccaagcgacacgctacgctgatgttaatcagttgaacaatagtcaagtcgtgcgggtgatggcgttaccgacaacccaacgactgaatcggttacggatcgttaagggacggttaccgcggcatgccaatgagatcgtgttagacgcgcaagcacagcgattgcagccgaagctaaaagtcggttcaacgtatcgaattagcagtacggctaagcgcaatgcacagttcacgcggcgaacattcaaggtcgtggggtttgtcaattcaccaacgtatgttgaaaatacgaatcgtggtgtcaccaacattggtaaagggactttggactacttggtctatgtccgtccgcaggtgattaagtccagtgtgataacgcgcattgacgtgcaattcaaaaatttgcggggcgtcaccccctacacggcgaagtatcggcgcttgaatcgcgagaacaccgcgcaactcaaacgctggttaaaaccacaagcgcgtaagcggcagcaggcattacaagcccaggcccaggctaagctgaaaccattgcggcaggcgacccagcaacttgctagtcaagtgccagcgggaacggcacaactagtcaagttacaaagccaattaaaacgcgcgcagtcccaggtcgcggccatcacaatgccgacttatttgtacactgaccgtacggataatccgggttacacagaatatcacgaaaatacgcaacgagtcgtggcactgtcgactgtctttccgctgttctttattgcgattgccgcgttaatttgtctaacgacgatgacgcggatggttgaagaattgcggctacagatggggacgttaaaggccctcgggtatacgaataccgcggtcggtagcgagtttatgatttatggtggtttagccgcgctgattgggaccgcgctaggtgtcctgttcggcgtcaattttttcccgcggtttatcgcgcaggcctatggtagtatgtataatttgcccgcaatcaacgttcaatacatttggatggacattggtatcgccttagccattgcgttgttgtgcacgttggggacggcactggtcgtgctccgcgtggatttaaacagtttacccgcgcaactcttacagccacgagcacctaaggccggtaagactttgctattagaacgctggcaatggctatggcatcggctgagttttaatcataaaatcacacttcgtaatctatttcggtataagcaacggttgctgatgaccgtgctcggtattgcgggctgcatggcaatgatgattacggggtttggcttaaaggattccattggtgatattagcgtcaagcaatttaacgagttgtggcactacgatgcagtggtgacgcgtagtgggaacgaaacggaccaacaacggcaagcacttagtcgtggtcaactttaccaggctagtttgaaattacaggccaagcaggtgacggtcaaacagtccggggtagcagaacagacggctacgctcggtatcccagcaccccaccaatcgctaagcaagttcgtggtattacggcaccgacaaagtcatcaggccattcatatcggtaatcgcggtgcggtcatcgatgaaaaattagctaagttatatggcgttcatgcgggcgatgatttaacaatcaagttggccgggcaaaccaccaagcggattcacatcagtgcggtggctgaaaattacgtcaatcactttatctatatgagtccgacttattatcgacgtgtcttcaagcaggcaccagtatataacacgaactatgtccggtttaagcaggcaacgaaaaagcaagaaaatgcttatgcggatcggctattgaaacaggcgggggttcagaacgtgacactgatgagtacagagaaagccactaattttaaaatgctggatagcatgaacttagtcgtattgatctttgtcatctcggcgggggcactagcgctagtagtgctctataacttaacgaatattaatgtttctgaacggatccgggaattgtcgacaatcaaagtgttgggcttttacgatggtgaagtgacgatgtatattttccgtgaaaatctgatattgacggttttaggcattattgccggttgtttcttgggcaactggttgcacgcatatatcttgcaaacggctgaaacgaacgcgttaatgttttcaccaacgattcatccgttgagttacgtttacgcggcattattgaccctggcctttagtttattagtcatgggaatgatgcatcgtaagttaaagcgagtcaatatgctggatgcactgaaatctgtcgattaaacgtgtctgacaacggccaacggtagccgaagtggtataattaaattgattggaacagtttaattaaggatgactaggggatgaatggcatggcagaaacggcacagttagaagctgctgtacaggcattaagcgatattgtaaaaatgaatacggtaaataaccatgagcaattggtggcggattatttggtcacacttttaaagcaacatggtattgaagcacaatcaatcgagtacgctcccgggcgggtgaacttggtggccgaaattggtgatggtcacggtccagtcgtcgcgttggatggtcatgaagatacggtggcgttgggtgatgcagataaatggcacacggacccgttggcagcaactatcaaagataatcggttgtatggtcgcggtgtgacggacatgaaggttggactaatggctgaagttttcgcgatgattgcattgcacgatcaagacgtcccactccatggcacggtgcggttactcgcagctgtgggagaagaagtcgaccatttaggtgctgaacaattgacggaactcggttacgccgatgatattcaaacgttgatctgtgcggaaccaagcggtgcggacaaacagcttttactgaccaagtcgattcaagccatgttaggtgttgacgacgatacggcgcaacggatggcggatgcgaatccgacgaccgaacaacacttcatcgaattagcgcataagggttcactgacttatacgattaaagcgcaaggggtggcggcccacagttcgatgccagcgattggtcaaaacgccatcgatatgttgatgacttactatcagaaacaaaccgcctattttgacagtttcaagactatcgttaatcccgtattgggcccaaccgtacctgtcgtgacgttaattagtggtggcgaacaggtcaacaccgtcccagccagtgccgaaatgtcagtaaaaattcggacgattccagaattacggaatgaccgcttgattaatgatttggaagccatcattgctgaatgcaatgcggatggtgccaatctaacgatggacatcgcaagttcgttctacccagtgcatacgccggaagatagccagttggtccagttggcgaagaaggttggggaacaagtcttacaacagcggctcccgtactttggtgctcctggtgggacggacgcatcgtcttatattgtaaagagtcctgatatgcaagtgatcgtcttcggacccggcaatattacagcgcaccaagttaatgaatatgttgatttggatatgtatgggcgcttcatcgagatttatcaaaaaatgattacggaattgctggcttaacggaaacgttaataatcgtgaattaaattatgctggaaaaggtttcaaaaaaagtaatagtcgtttcaagaattgattcttgaaatgactattacttttttgagcaaggcgactgaacctcggtgtatctaacttaataatgattgtggtgacggttgtgcgttattcaggttattcgtgatgcccaaaccgttgcaagtaactcgaaaaatcttcgtgatcctgggtaataccagcttccttttcttcataccaattaattttgtcgttgagaatctgtagatgatgctggacttcgttgaactggacgagaaagtcttctttaacgtgcttgagcagtgctaatcgcttgggaatcgtgtcgtcgccggctgcgcgccaggtaacgtattgctgcaattcgctaatactcatacccgttcctttaagatgtaataagaatttgacccagttaatatcggcagtctcataatagcgccggccattgtctaagcgatgtggttcaatcaagcccgctttttcgtagtagcgtagtgtgggggcgctgagaccaacggctttagcgaagtcaccgattgaataacgttctgtagtagtccttaccaattttaaaattctccttattctaacttttatttgaagtaactttagcaataacaataccacgaaatcctattttagcaagtttaaactttattgttgacttaaagtgtactttaagttgtaagctgtattcatcaatcagttagcaagcaaataattaaggagtgtttttaatatgacaacaactaataatagcggcctatttggattaggtgtaaagaatgaggcctaccaacaatactttatcggtcaaagttacctgaatgccttagccggtgatgagcaggtcgacgtgaatgtttccaacgtgacgtttgaacccggctgtcggaataattggcatatccatcataacggataccaaatcttattggtgacgagtggtgaaggttggtatcaagaggctggtaagccagcccagttattacatcccggcgacgtggtcacaattcatcctggtgtgaagcattggcatggtgcaacaaaggatagttggtttgcccacatcgcgattactaagggaactagcgaatggctcgaaccagttgacgatgaagcgtacgcaaaattataaaagttaaagcagttattgaaggaggaaactaatatgacagttaaacaaaccgcaggacgcgacaatttaggcaaattagcaccacaatttgccgcgttaaatgatgatgtgttatttggtgaagtctggtcacgcgaaagcgcactaagtttacatgatcggagcatgattacgattgcatgcttaatgactagtggtgattttccacaattaaaggcgcattttaagatgggcaaggatcatggtatctcaaaggatgaagccgttgaaatcgttacccacttggctttctatgcggggtggcctaaggcgtggtcagcactggcgctgattaaagaagtttacggtgaataggaggaatagttagatgacagttaaaaacaaagtcgttgtgattacgggggcctcgtccggaattggggcgacgaccgctaagcaattagccagtaatggtgctaaagtcgtattgggcgcacggcgtgaagaacgcctggccgctttagttgatgaaatcaaggcagccggtggacaagcggcctatcaggtgacggatgtaacgaagtcggccgatgtacaagcactggttaagctagcgcaaacgcaattcggtgggtttgacgtgattttcaataatgctgggattatgccgacatcgccaatcagtgccttgcacacggatgaatgggaccagatgattgatattaacatcaaaggcgtcttgaacggggtggcagcggtcatgccaatctttaccgctcaaaaatcgggtcagattattacgacatcgtcagtggctgggattaagtcctttgctggctccggcgtgtacggtgctacgaagtttgcggttcgtaatttgatggaagtcattcggatggaaagtgcccaagaaggtaccaatattcgaacggtcagcttatatccagcggccatcaatacggaattattgcacacgattacggataagacggccaaacagaatatgactgatttttatcaacaagtgggaatcagtccagcagccgttgcgaacgtggttaactttgccattgaccaaccagaagatgttaacgttaatgaatttacgatttatccgacgaagcaggcttaacttgatttagctgttgttaacggttgtttgagctagttgccgataagtcgaaaatgtgaattcaaaaaatacaagcacccggtctagcgcataatggcgttgctagaccgggtgcttgctgttgttatattgtattaataatattcaattagtgggcttacttcaaccgtaagccacgctttaagttgccccagaaaccgagttcatccgtttgtaacattagcccaccatagattcggccgatgtagatcatacttccaatgattgttgcaatgagaatcaggagtgacacgattgcagcgggcatcgttgccatgccgttaatgaggcgcaatggcatgaagtatgatgagaagaacggaatatatgagaaaatcttaacgaagagattggtgggtgtgttctgaaaggctagggccatgaaaaacgctagcatactcagatagatgaccggttgtgctgccttgctagcatccgcgacccgggtcaccaaagcaccacagaaggccgacgctacggtgtagagtagtacggccagtaatgcaaacaacaagttgattgagaccaagttgtgaatcacttgattgatcaaatcggtattctgttgccaaaaatcaattgtgagtgagctacgtttaacgaattgcatgacggcaaagccacccactaagtagacgagcagctgagtcacaatgactagtaagacaccgtaaattttaccattgaagtatttccgcggtgtcgtactcgagaagatgacttccataatcttggtgcctttgtctgcggcaatctcttgtgctgtgattgctgaataagtggtcaaaatcaagtagacaaagaagacgacaatatagaaggagaccgttttagccgttttatctgaagcagcgtgcttctgtaattgttcagtaaattttggctgtacagccaacgcctgggtctgtttggcacttagttgtgcgcgctgtacgttacgttggctttgggcagtggctaagaactgctgaatcttagccttgtcaccgctgctgacagcattaggaccagtgaactgcgcttgcaactgttgatttttggttgttaaaacgaggtagccggcgatgtcattgcgcttcgtcgccgccttagcgctggcgagtgtttggtatttattagcggtagccacatgactctgcttaatgaaacttgtgcgtaattgtgggctagtgctaacgaccgcgatgtcattcttactagcgctgggtgcagcaaaataagaaaaggcggccacgaacccgaagaacaagaagggcataaagacgagtgacaaaaagctccaggacttgatctgccgcaagtaggtttcaaaagtcacaatccaagtcttattcatggttaacacctcccgcttcagttcggaaaatctcatccagcgttggtggctgctgactgaactcttcaatgtaatgaccagcagtgacttgatcaaaaatcgctgggccaactgaagcatctgcaagttcgagtcggaatcgctgggcaccttgttgagtaacgttggtgactcctggtagatcggccagttgcgcttgtgaccagtcagtcgtcaagaagagacgggtacggccaaactgggcgcgaacgtcttcaacggtacccttaaggactgcttcaccattacgtagcataacgagtgagtcacagatcgcttcgacattactcatatcatgactggaaaaaataatcgcggcgccccgttgcttagcatctaaaatagcttgcttgagcaggtcggcgttgaccgggtccaaaccactgaatggttcgtccaagataatcagtttgggatcatgaattaaagtacaaatcagctggaccttttgttggtttcctttagataacttatcaatcttatcggtcggctgccccttgaccgcaaagcgcttcatccatgcggcaattttgcccttggtcacccgtgccggctgatttttcaaacgggccaagtacacgatttgttgtgtgatggttaatttggacattaggctacgttcttcgggtaagtagccgatttgatcgtagtcatcagcggtcaacggttgcccattccaagtaatttgaccgtcgaatgatagaaaatttaagatgctgtgaaacgtggttgatttccccgcgccattttgaccaatcaatcccatgatttccccgtcatggacgtcaaatgacacgtcatttaatgcttgaacagtcccgaaacgcttctgaatatgtgcgatggatagcattagtttgtcccccaaattcttgaaataaagtcattacgtgttgtgcgagctaattagtcatgaaataggatcaaaacgtgccaagtttagattgttattcgtcagccggtgtgcgttctatgccgacctccggggctgggtgacaattgctggaacgtagccgacgtcgatttgagctaacgcccaacccgcgtcatctcaaatacgagtcttattctaagccggaagcaacccacttccagctaagaataatttggctactgagcattgtcacccagcccctccagtcgggaacccgctcgaatggctgatgaacggctacttaacttggtgaaatttgtcgttggctattttgatacgggaactttaaataaaacatcagggtgcataacctactttgtcgcaacattcaattttgactacagcggcttaagatgttgagctattccaatatcattttcagtctgatagttgctgagagaaattactatttatgaaaaacaatgacgaattcaccaaaagttgggtccgcacatgtccgccattcgaacactgtcccgactggaaggcgtttcggccaatgctcagcggtgaaattccacttagcaagcgtccttggcttggttagtggaagaccagtatttaagacgtggtcttcggcttaaatctgtgtccaccgcgttccagcaattggccgaaatgcctggaagtcggcataggacgcgccaactaagtaattttacgttaactcgaactttttccagcgggcctaagctggctgcttttgaacttacacaacttggcacgttttaatcctaattaggcctaataactattggcacaattagcaatcattgtttgattttatgatgacatagttgattcggtgtgacaagggcgtgcgcttggttctaaatgaagcttatttgggcaagcgggcgttttcaagagctaatagggcgcgtttcattggcaaaccaccacgatagccgccaagttgaccgtctttgcggcggatacgatggcaggggatcacaataaggagtggatttttaccaacggcgctggcgacagctcggactgcggtagggtgattgatcattgtggcgagttgtgaataagttgcagtttgaccgtatggaatacgggttaaagcttgccaaacttggtgttgtaaaggggtgcccgtcgtttggtcgaggggtatgtcaaaatgctggcgttgaccagttaggtaatcatgtaattcttgacaggcctgttgattagcttgttgatcataatgaatattagcggatttgaagaaggcttgccattcgtcgcgtggaccgttggcacggccgacaaaggctaagccggtgggcgttgtgcccagccagtaagtttgctggttaatggttgtttgggtcaatgttaagtgcatgtgtgagccctccgtctcaattaggatagcgttagtataacagaattggtggtgtgacgacctgattaaatcagaacatcactgctatatcttaatgaaaaaagccagtgcgaacgatgagtcgtccgcgctggctttgatgtcaatgataaagcttgaatttgataattgcagatgctgattagtaccagccgtttgcttgccagaacgctttagcagcagtccatgagccgtaacggccagcgacgtatgcgtcggcagtcgcttcttggttggcggcagaataatcgccatttaagagggattgaccaagttgatatttaccatagtaaataccgttggttacggtgtaggagccaccagattcgcgagcagcaatccaggccttggcagcagcctcagatgtactagtcgagctggttgtcgtgcttgttgttgaactggccgtgcttgagctagcttgactggcagttgtgctgctagtacttgcactactagttgcggctgaactagcggtggtcgtcgtgctttgactggttaccgttgtactttgactagccgcactttttactgaactagcactggcttgactagtactgctttggctagcggccgacgttgcactctggctcgtcgtactagtgactgaactagcactggcttgactagtactactttggctagtggccgacgttgcactctggctcgtcgtactagtgactgaactagcactagcttgactagtactgctttggctaacggccgacgtcgcgctttggctcgttgcactggtaactgagctggcgctgttttgactcgtgctgctctggctaacggctgatgtgctgctttgactggctgcactggtaactgagctggcactggcttgactcgctgtgctttgactaaccgttgacgtggcggtaacggtgctagtaggattttgaacggcggcactagttgttgtagtcgtcgtgcttggcgtggctactgaggtggtggcccgtgtcattttaactgtctggtgtttgttaacttgtagtttgtccccgacgtagattaagttgacgttcttcaaatggttcaacttttgaacggcggcaacggttgttttgtgagtgtctgcgatttcactgacagtgtcaccagccttgaccgtcaccgtatcggccttagcagcagttgcaccaagggcaatggcaccagttgttgctaatgaggataataataggtgtttaattttcatataattgattcactcccaaactagattagacttcccttaaagtttaccatcatgtaagcggttcgttaagcgcaatttgcttactgacggactttttagaaaataaaacatgcccgattaagacatagtgtaacagattaacgcttacattaccgctaatttgcaatgcaatcttagtgacgagtgtgtcaatgtagtgacctgcgtaacgtgattacgttgacggtggggggcatggtagaattggacttttgaaaagccctcccaaattgactgcggcttgcacgtgttcgactttaccagcagaccatttgcatagtggttgatgaaggactgcaataagggccgatcatggggggattgccagtttgcagtcaggcaagtccgatgcacctatatggcaacagaaaaacgcggcccccatataggaccgcgctgattgtatgttcagttgtgcatgaatgtgtttagtaataaccgttggcttcccagaaggccttggccgctacccatgaaccgtagcgtgaagccacgtattcgtcagcgacggtttcctgattagaagctgagtagtcaccgtttagaagtgacttgctgagttgatacttaccataatagttcccgttagatgcggtataggagccaccggattccttgttggcaatccaggcttttgcggcagcttcagcactacttgatgtgctagttgttgatgaactgctgctagtgctcgttgtggtgctgcttgaagtggtagcactattgctggctgccgtacttgtgctggcggcactggaagcagtggtgttgctcaacttcgtcatagatgcggaagtagcggttgaacttgacgccgtgctagcttggctcgttgcagagcttgaagtggcactgctagttgacgaactggcggcactgcttgaagcagcactgctggttgatgaactggtggcactacttgaggccgcgctggcggttgacgtgctggtcacgctacttgaagcagcacttgtgcttgatgagctggcagcactacttgaggcgacacttgtcgttgacgaactggtagccgtgctagctgctgacgtacttgtactgctgctaacggctgcgctgctggcactttgggtgctagtactgttggccgttgaactggcagtactggtcgaactagccgtacttgaagcagcactagttggtacttgggtagtaaccgtggttgcgtggtgtttgccgttgacttccagtttgtcaccgatatagatcaagttaacgttctttaaatggttggctttttgaatcgctttgatggtcgtcttatgcgttaaagcaatttcactgacagtatcgccagctttaacgacaacggtatcggcattagcaacggtagtacctaaagctaacagaccggtagctgccaatgaagttaatagggcatttttaattttcataagttaatcagtcactcctataaaagttgtgttgttatttcgattgaatggtgattagtataccgaccgcagattgcaaagcaataaataacagattacggtttgagccaattttgtaataaagtaacatggtgtaacaagttaacactttcatcatgttttcgccacattatcatcacactcgcggtaaaattcagaaggtaacttaaaaaatggtttaaagctgtgagcgatattcttattaattcagtaaaatttgttataatcgagaccgttaagcagaacgtcgtgtaagggagcgagtaataatgtattattttgtgaataccagcattaacccgaaaaaatcgggaattgaacatgctgagatgaaacggctggcactttttaaccagcatcacgttcctgctaagatggtcacgcgatttttttcattatcgttacaccagacactgacagcagcggggattgcggctgaaaatcaaattaatctgtttgatttcattcagcattccagtgaacggccaacgactaagatgacgattgaagacctgcatctagcaccggacttgcgggtgcaacccgttgggcgtcattatgaagtttatcaaaatgaccaattattaatgaaggtcaatacatttctgaacactcaaaaacaactgaacaatgtccaatattatgatcaaaatggtaagttagtgaagaccgattggtacgatacccggggatttaaagggcttgaacagttctatgccgctgatggacaagtagcaagtgaacaagtctttaatccggacggggaggtcgtctatcagacatttcatatggcagatcgacaaaatcaggtccaaaattcactttatcgattcattaattatgaggggcaagactggtcatttgctggtgaaacggcaatgacaacctttttcctcgatgaacttaatcggaggacgccgcatgcggtctttgtcattgatcggacgtatgagttggcttacgccgcacttcacatgcgaactaaagcgtttaaagtcatgcacttacacagtaatcacgttaatgatccagcacatccgaagacggctagtctcaactttaattatgcttacgcgctcaataacctagaccgatggaatggcgttattgcgtcgactaagcaacaaactgctgactttcaagcccgctttggcaatcaacccgccgtttatacgattccagttgggattgtcgatgacgcgactttgaatgcgcccaagccatcttttgatcagcgcaccgcaggcaagattatttttgtggcgcgtttagccgaagaaaagcaacaagatcaggtgatccgggcattcaaaaaggtattggcccaagtgccgaatgcgacccttgatttctggggctatgcaaatggagataccggcaaacaactgcatcaacttgtggaacagctgggactgaaagcggcagttacgtttaatgattatacgaccgatttaacagctgtctataatgatgcgcagttggcgatgttaacgtcgcgggcagaaggttttgcacttgccttgcttgaaggtcaggcccacggggtgccccagattgcctatgatgtcaaatatgggccacgtgatattattcgggacggtcacgatggtcaattggtgccggtcaatgatgaaaatgcgttggctacggcgatgatcgacttgttaacgcagccgaaaaagttagccatgtatagtcaacaggcttatcaagatgcccaacgctttagcacaacggctgtttggcaacagtggcaaccactcatgaaagccgcagccgatttttatcaagttgagggggcaacacagcgatgaatttttttgtgaaccaatatttaatggcgttaaattctggtgtggaacatgccgaatttaaacggctccagttgtttaaagatcatcaggcaccggctaaactagtaacgcgtcaattcgatggtttgttacatcagaatatgcggcgcttcaatattgccgatgatcagatggccaacttgtttgacttttttcgtgaaacgaccagcttttccagtcgggtcatcaagatggctgatttgaactggccaactgcctatgacattaagccggaccccaatgtcagtgaggtacgagctggtgatcggctggttgctaaggtccactttgttcccagcacggtggggcacgtgtacttcattgaaatttttgatcacttcaataatcttgttcagcgtactgattatgatgaacggggctttaaagcccgtgatgaattcttctcgtcagccggggaaccaatcacggatattttctatcgaccagatggtagtcggatggccgaacagtattatgcgcatgataataatgggactaattatgtttcgttgtgccatcttatcaattatcatggccgtgactactactttaatggtgaacaagaatggtaccggttcttcttagatgaactgaacaagcaatatgatgaaaacaacgtctttattgcggatcggccgttagctgctcagtggccggtggtgaacatgcagacggcggctaaaaaatatttgtggttacccacgccacatgcagtcgatccgcgtgatcaagtctattctaatttgaataacgcgtatgtttatggcctgcacgagtttctgagtgcttgggacggtgtgattacgagtaccgaacaacagaagcaagatttgacgcagtggctcggtggtcaaccgagtgtcccaatcctgacgatttcagcagccattgtttccaaaaagcacgctcaacacgcaccaatttcgatcagtgaacgtcatgcgcatgaaattatttataccggccgtttggatgcggaacggcgcgtcgatcagctagtgacagcttttgaccaagtgcaccataagattacggatgcgaccttagtgatttacgggtatggtggtgagcttgaccgtctaaaacagcaagtgtcccagttgcacctagagaccgccgtgacttttgctgggtatcaaccgaacttaacaatggcttatgatcaggccggtgcttacgtttatactggtgaaagtgatgcgcagccattatcgttaattgaagcccttagtcatggtgtgccagcaattgcttatgatattaactatggccctaaggatgttttgaaggatggcaagaatggttatctggtcacggatggtgccgtcaaccaactagtcagagcgctgacccgaacacttgaaagtccgcaacgtcagcaacgacttagcaagggggcctatcggagtagtgaacaatatagtgatgaacaagtttggcaacagtggcagccggttgttcagtgaatatcaaaaatggtctgactttagtggtcagaccattttttaaacgctaatgtcaaaaagacctaataacaacggcggggatcgctaatctgaccacgttgttaggtactgggtaattgcagtctgtacggggcgcagtgccgctgccggttgcgtgttagtcagtaaaaagaattggcgttggtaatgagcacttagctgttcgatgggaatctcgttgcttaaaacgtgacgtgaaataattgtttggccgataccatgagcgaggaggtccgcgatgatttggttactgtggatgaccatgacttgtgctggctgaatgttgcgggcttttaaaaaggcgttggtataatgacgcacaccggaattaggttcacgtagcagccagaggggactggcaaagtcgcccgcatggacgagctcatcgtgaccaaatggcaagcgattgagctggtcagtaacgagtggcttttcaactaaaccaaagtccagtttgtgttgggacatagcggtcaaaatttcggccgaattggcaagcgtcacttgaaagtcaaagcgatcactgacggcactcaaattggctaataaagtgggtagaatcagacgcccggttgtgtgtgaggcaccaatccggcaaggaactttcactaagtggcgtggtgattgcaccgctgttttggtagcggcccaagttgttaacagcttttgagcctgttgatagaggagctgaccactggcagtaggaacgatttcttggcgcccgttacgtgttaagagcgtggtttgtaaatcggcttcaagttgtttgatttgtgttgagacggtcggctgggaaataaaaagttgctcggcggcatgggagaagttgcgagtttcgtataccgcacagaacgtttccaattgtttaaacattgtgttcacccctaactattatttttattaatagtaactatcataatgatttatttctcaaatgtaaataactttcgtatacttaaaagcatcgagatagagatgggagaaagcgaatgaaggtcaaagggattttaccggggttagtgaccagtctggtcattgcaattattagtcaaggattggcgcaatttgtgccagcgttaggtgcggctactatcgcgattctattaggaatcattggtggcaatacgtttctgaaacaaccgcaacttggtcgggggactaagttcgcagaaagtaagctgttggaatattccgtgatgttgctcggtgcgacgatgacggtacagacaatcggcaaaattggtgggttcggcgtgctctttattctttgccaaatgacgattacgatcgttggggctttgtggttagggcgtaagctgggtttcagccagtcggtacgtatgctgatggccggcggtaacgccgtgtgtgggtcgtcggcgattgcatcaatcgcacccgttattgacgcggatgaagatgataaggggactgtcatcaccttagttaacttgatggggacagtgctgatgttaacgttaccggtcttaggaatggccgtgtttggtggcagtgtcattcttaaaggggcgttgattgggggaactttacaatcagttgggcaggtggtggccgcagctagtatggttaatcaaacaacggttcaatttgcaactattttcaaaattatgcggattatgatgctagtcgtcgttgttttgatttttggccggttacaccaacgcacgattgaaaatgaattggctgaggatgctgtcgtcagtggtaatgggaacggtcattggttaccatggtacgtggctgggttcttaatcttatgtgcattgaatagcttgatttcgttaccagcaattattggcgcaacggctcatacaattagtagttggtttgaaatcattgcgttagcagctatcgggttacgtttgaatcttgttaactttatgaaagctggcaagcgcttagcactgtatggcttaggcgtggggacgattcaggtcgtcagcgccttgattttaattacgttattactacaacattaattgaattttgagacacttaaatcgcaatcagggttaatcatttaattaatcatgattgcgatttttcatctaagagagtaggaatgttcatgctaacttatcgagtcacaccagcgattgaattgcgagaaccactaccccaaagcgatgcgccggcattactagcattattaacagctaatcgtgcgcagtatcagtattatttgctatgggtggctaaaattcaaacggtggcggataaacaacgctttttaaccgcggcacagcttcagttacaatggtcgcaagcgctcaacctagtcattgtcgttgaacaacgggttgcggggatggttagctgtgaccacttcgatgataacgaccacagtgccaacatcggctattggttgggacgaccatttcagggacgcggcgtcatgacggcagccgtccgtggcgtttgtgacttgggttttaatcagtatcatcggcaatgtttgcggattcgtgtggcggtggacaatcaggcaagcaatgcggtggcgcaacgggcgggctttgactttttgattcagcatccaggtggtcagcacttattggatggcgatcatgatgagaatgtgtatcaggtttcagcggttgattggctggcgaagcgccacaagtgatgacgattaaacaaaataaaactgactagccaagatggttagtcagttttattaacgtctaatttttaactgtcaccacttgccatgttttaggaattgtaaacaaatattgtcgttgaacaatttttgtcttggtatttcctaggctgaataacacgtgtgtcaggtgatttttgaactgccaagtcgtggtctttagttgaacctgcgcgggtgaaccgctagtcagtttagttgttgtggtggttgcggtcaccgtgtgactgactttagtggcggctgcaacccggtaactgatgacacgttcagaccctgttccgagttgctggacccgcaacgctacttgtttggatttgagcggggctaagtcttgaatctgcgtgcgggtgacctcgtgcatgccccaatggtaattgtcgtttaggacgagggtgatgaggctagtggcaataatgaggccactaatgataatggcaatgagacggttgcggcctgccggtgaaaaaatcatcgtgccagcaaagacaaaggttgccagaattagtaagacaatgatcatgcggcatcatcctcctgactaatggtttttgaatgattggcttttaagaagaaggtaatcccaaagccaatcgcacaaaaaatgagtgagacaacgaacgccacgtgataaccagttaaggttgcggtgattccgtcctgacggtatttcaagggtgcctgtgtcagtaattgatgtcccggcatttgccacttagcgacgctggagtagacactgattaaaacggccgtccccattgaagctgcgacttgacgcagggtgttgttggcggcggtcccatgggaaatcaaccggaaaggtaacgcattgatcccagtcgttgtgacgggcatggtaaccatggtcaggccaaacatccgaatggcgtaaacaacgatgatccataagattggggtcgtggcactaattgataggaagaaagcagttcctagcgttaggagtaacatccccgtcattgctagtctgcgggcaccgatatggtcaaagatgcgaccagtaatggggctcataatccccatcatgattgcgccaggtaataaaatcaatccagagtccattgctgaacgaccgaggaccgtttgaatatacattggcaaaatcatttcgacgcccatcatagccatgtaagcgagggcagtcaggattgcggatagggtgaaagccggaatcttaaagacacgtaattccaataatggctgatccatgtgaagttgccgccagacgaatagaccaatgaaaatcagaccaatgactaaagttgtgagaacgactgggtcgccccaaccagcattaccaacggatgaaaaaccgtataacatactgccaaaaccaattgttgagatcaagactgaccaccaatcaattggttgtttggaagttggtaagactttccgcaaagtgaagaatgaaacgatgatgactaggatattgattggcaggatgaataagaagagtgcccgccaggaatagttatcaataatccagccagagagtgtcggtccgatggcgggtgctaagccaataacaatgccggctgtccccattgcggaaccccgtttttcgggtggataaactgaagacatgattgtttgaaacactggggcggaaatcccgacgcccattgcttgaatcattcgggcaatcagcaacatctgaaagttgacggcaaagtacgccagcgtagttcccagaccaaaaataagcatggctgttaagtacaaatacttggaattgattcgggtcagcaaccaggcactgacgggaatcataattcccatgattaacatgaaaccagtggtcaaccactgaacggcggttgctgaaatatgaaaatcggccattaacgttggaaaagctgttgttaatagtgtttgggtaatgaaggtggtgaacgtcccgacaagtaaagtcaatacaagccaagtccggtgatagggctggccgttggcatcaagcggcaacgttgaattttgagttggcataataccgtcctttcttttataaattctgtaataatgcacaatcaataagtatatcacgatgcaagtcctaggcctattaattggtaccggggcggtctgctgagtgttcggtgtcgtggtaaaataaaatagataatattagttaatttgtggtgagtcgtgctaatgatagccagcacaattcatcgacattcagtaaggaagctaaaaaatatgaccaaaaaatatttaacatttgattgttacgggacgctaattaatactgagccgctgtatcaatgggtggctaatttaggattggcgattggtttagacccactaacggttcgcaaagcctacgcgacttatgaggacgatcctgccagtgtcaatccttatctagattattcaacattagtccgggctgatcttaagcatttagatcgattgtttgaacagaaacacttctttgaaagtcattacgttgaatgcttggaagtgcaacgacacctattaccatacgccgatgttataccgaccttaatagcctggcagcaattgggctatcaattgattattatgtcgaattcttcctgggatattatgccggccaacattgctgctttaaaggtgtcgttcacagcggttgttacggctgaagacgttcaagcttacaaaccagcgtcagctttctttgaaacggttcaagagcgttttaagttaacggcagataatcattggcatattgcacgtggctatgaatccgatgttgttccagccagtgctatgcagtggccgatgatttggattaatcgtgatcagcgacaaccgactagttctgaacggccgacccatatggttactgatttggccgctgctaagcagtgggttaactaggcgtgcgcggtagtgtccccgttgatcaacagttaaaacactggttgatcatcagggttgaacaagctttctaattttgactaagctgttaaatctcaaaattggaaaggaaattaacgtgaattcaaaatctttaaataaaagtacggtcctattaatggcgatctccgcagccattgtagtggctaatattaattatattcaaccgattgaggcggaaattgcgcaacaatttaatctcccaaacgccgttattggcgcggtggcaatgctgacgcagttaggctatgccttcgggttgctcttaattgtacccatgggtgatatcatgaatcgccgaatgttgattatgcgcttactggtactcgcaatcatttcagcgttactagccttcgtggctcccaatatttgggtgtacgccttggcaagcttactgattgggataacctcggtggcaccacaagttattattccgtacgccggctttctcgcacctcgtaatcagcgtggtcaagtcttgggcaacgtcctgagtggcttgctcgtgggggttctcttgtcacgaactgtcagtggggtacttgcgagctatttgccttggcagatggtctatctgattgccgctatcttgattgcaggattgtggctcgtcttgtggcgaaaattaccgcatgatcccgtgacgacacataccacgaattataaagccatgattcagacagtacctcagttagtaaaacgctatccggttttgcgagcgtcggctgttaacggatttgtcttgtttggtgtttctaatattttctgggcaacactcgtcttttacttgcagcatcaatacgggtggggaagtcgtgaagctggtctgcttgcgttgctaggtgttaccggtgtgttagcagcccctttaatcggccgcctagccgatcgttttcggccccgaacgattatcggcttgggtctagtgttatcaacattagcctacgtagtgttttggctgagtggtacgcatttggtggggttaattattggtatcgtcattcttgatttaggtactcaattcgggcaggtcgcgaatcagacacggattcaaagcatcgatgtccatgtcagtagccgtttcaattcggtattcatgtttggctacttcatgggtggcgccctaggttcattttgtggcaacgtcttatgggatttagctggttggaacggcgtctgcgggttagcggtcgtcgtgttaatgattggcttttatgcccactttgttcattatccacgggtggtgacacgacaagcgcaacattagcagtgtattagttaatcggtcatgaatcatgattaaaacgtgtcaagtttagattgttgttcgtcagccggtgtgcgtcctattccgacctccggggctgggtgacaattgctggaacgcagccgacgtcgatttgagctaacgcataacccgcgtcatctcaaatacgagtcttattctaagccggaagaaaatcacttccgactaagaataatttggctactgagcattgtcacccagcccctacagtcgggaacccgctcgaatggctaatgaacggccacttaacttagcacaatctgttgttggctattttgatacgggaactttaaacgaaacgttagggttgtattaaccactttgtcgagacggccaattattacgatgttgattgaggaatagtgagacatcctaatatcattttcaccctgacagttgattgataaaattattgtttatgaaaaacaatgacgaatttaccaaaagttgggtacgcacatgtccgccattcgaacactgtcccgactggaaggcgtttcggccaatgctcagcggtgaaattccacttagcaagcgtccttggcttggttagtggaagaccagtatttaagacgtgggcttcggcttaaatctgtgtccaccgcgttccagtaattggcagaaatgcctggaagtcggcgtaggacgaacttgaaaagcatgtttacgcccactcgcacctgtttccagcggtttttagctggccgtttttgaacttaaaaaacgacacgttttaatcatgattaatcctaaaatgactagcacgatacctgttgttaagtaggctgttgatgtttgtgtaataacttattaaatcagaaatctgcgtttaagttaactaacataacgtttatcgagaagtacaacgaaatgaggtgttcaagtggcattaagaaaatcaagaaaggatcgcatcttgcttggtgtttgtggaggaatagctgaatgttttcagacttcttcgactttagtcagattagtcttcttctttggcgggggaatcttcttttggatttacctgtacttggcttataaattaccagaggacgagtatctttgaacgaactgtttattataccgagtaggccgttaatgtttgtgtaataacttaatgattggtataggcgctggcagtaggggacagttaattaatatgaagtatgctgatgatgagcttaatgaatattaaccataattggcgttgaacttaatattagtcgtaaatcaattaaaaggattgtatttcagagaaaatggtctaaactctaattattcatgttagaagatgtaacatgaaatctaaataagagggttttgctatgcgaattgaagctgattgtattggtaagttagctgttccggatgatgctttgtatggaattcatacgttacgtgccgttcataattttccgattacgacggaattgatgcatccactgatcatgcaaagtctcgttcaaatcaagaaagcggcggccagtgtgaatgcggctgccggaactttgtctaatgataaggcacacgccattattgcggcatgtaatcagttactactggggcgttacgcggataacttcattgtgccagcgattcaggggggtgctgggacctcggctaacatgaacgtcaatgaagtggtggctaatttggctcaccgattgatgccggcagttgccgttcatcccaacgatgatgttaatcaatcacaatcaaccaatgatacttttccaacggccggtaaaatggcgctttgcatgcaactcccaggactattaacggcactcagccggttggtacaaacgttactggttaaatcgcagcgttatcaagatgccatcaaagttggccgaactcagcttgaagatgcggtaccgacgacgtacgggcggacctttcatgcttattaccaattattcaagcgtgatttgacccgtgtacggcaggcgggcgaacatctccgaatcgtaaatttgggtgggactgcaatcggtaccggcatcaacgcgactcacacgtatcaacagcagattttagtgaaattaaatcaaaatactgatttagatttagtagctgcaccagacttgatcgatgcaacgcaaaactgtgatttgttcgtggaattctctgcggccatgaagacgttagccgttgatctttccaagtttagcaatgacttaagattgctggcgagcggcccacaagctggctttggtgaattgaatttgcccgcacagcaagcaggttcttctattatgccaggtaaaatcaatccggttattccggaggttgttaaccaagttgcgtttgaagtgattggtcatgacacgacggtaacaatggcagcggaagcaggccaattggaattaaacgctttcgagccgattatgttacgggcattgatagccagtgagcagcatttacagcaggctttgactacattagtcgatcactgtgtgcggcaattgacggtcaatcgccaacgctgtgcagatcaagtggcacattcggccattacggcaactgttttggcgccataccttggttatgagacgactaccgcgctgattaaagaagcgctcaccactaaccaagcaattcctgaattattacatcgacgtcgcttgcttagcgatgatttggtcgagcagctgttttcaccggccggactaactcagccacgtccagaggttattgaacaactacgagtggttgcaaagtagccactgttttgcagtgcaatttatggctgagatatgctagtgctggaggttgacaccagccagtttaaagccaatggacgtcgcacgacttagcaaaaaacaaagttagcgcgctttctgccaattgctaaaacgcagtggatctaagcttaagtcgtatctcaaatgctagtcattaaaaatgagccaccagaatgaaaaattctgatggctcatttttagttgtcgtttacttagtcttaactaaaagcagtgaggcacattagtacaagttgaccaaagcaaagacgattggaatggtaacgacacttaaaatcgttgagatgctcattagggcaacggctggcccgggatcaccgtggactttgagcgagaacaagacgacgattccggcgactgggcaagcagccattaacactgtggtgaataatgggataccagtgatacccattagctggaggacaacaatcgccaagtatggaaacagtaaatttcgcaataagatgactaaccaaagacgtttatcgagtgtcgcacggttaagcttaacgtctgccaaactgttcccaataacgatcatggacaagggggtgttgaccgaactgacatacttaatggcgctattggcaatcgttggcagttgcagcgaggttacgaagatcagtagcccaacaacaatggcgatgatattcggattaaagacgatctgtttaagattatcccgccgatttccctgttgtccggtgaagagggtgataccgtgagtccagctaaaaatattgaaggccgctaacgaggcaacagcatagaatacgccagttgcaccgaatagggagctggttaatggaatccccataaaaccggcattagaatatacggcaccgtaacgcataatgcgacgcaaattctggtcagagacgcgtttgaatagtaattgcgtcacaatgatcatgagcacataaatgatcacaattccagcaatgacccgggctaacatttgcaagcggtcggctgaaaatgtcttttcaaaggcttgaataatcaagcaaggtgacacaatgtatagcaggatgttggttaaatcagttgaagtctgggcatgcatgaagccgagcttgttaacgagcaggccgacgagcatgagaatgaacatcaaaatgatttgactagttagttgcgttaaattcatttacttcagtccaataaattagaatactctcattattgaggcttggcctgaactttgtcaagattcatttaggccggatgatgcgcctggacaatatccacgtgatgtttgagatggggaaaaacatgatgatcagaccaccccatgatggcaccttgagcaattaaggcaaaggccgtcccgaagccaatggcacgcaaatgacctgtggcgaagaatgaaacgacgataatcgtcagaggtggcaaataactggtccactgggcaatgatagcggaaccatgtaaaaaccgaaagcgtaagatgtacgataaatcatcgttcggatgctgaattaaattacaacgctggtaaatcgagacggcggccgcaacgcctaatagtccaagcacgtttagaatcaagcgtggcaacaggggcagggcgggaatctgtagccaatcccaaaagtagccgataaattggaccaggtaactaaagggcacgatatagagcaagttggagataaaccgacgccgatcaaagtgacctaacagaagttggttgagaatcgtgacaaccacaccgtacattaacaaggtggttcctaatgaaatatgggtccagtcagctagattaacgctggagccagtccagacggcactgcctaggctggtggcgatggtgagcgcgttggcagcagaattcagaataatggaaaaaactaaaaaaccaaaacgttgacgaaaatcaggaatgttcaacacgactaagcgacctttcagttaacagtatatgagttattataaccgctttcataagtagatgtcacggctagacttgtaaaaatatgctatactaattgcacaatagattttacggttgaaggacacttcaagaattcggactacttttgggttgggtagtcagagcttgcggtgcccttttttaggaggtttttaatggattatgttggtagtttagcgttgattttaattgttacggcggttgcggggcacctgagtgtccgaatgggcttacccgcggtgattggtcaattgttaagtggaattgtacttggcccagccgtattaggttgggtctcagcaacaagttttatcaaagacttcgcggagcttggcgtgattattttaatgttcatggccggtttagagagcgatttgaaattgctgaagaagtattggcgtcctagcttgttagttgcggtcctgggggtcattctacccgttgcggtgattgactggtgtagccaactatttcaccttaacgccactgaaagtttgttcttgggcgtaaccttcgcggccacatcggtttcgatttcagtcgcggttctcaaagagttaggcgccctcgatggtaaagaagggacgacgattttaggtgcagcggtcgttgatgacgtcctggctgttttgattctgagtttgatgatcagcttatttggcagtgaagtcagtggtggcggtagtcatgcctcaaccaacttgggactctcgctggcgattcagttggcgttctttgtggcgctgtactttgtggtcaagtgggtggtgccacatttaatggccgtggggaatgctctactggttccaacctccatcacgctgatgtcactagtgatttgttttggactctcatacttagcggacgcaatcggtttaagtgctgtgattggcgcgttctttgccggtatcgccgttggtcagacggactatcatgaagttatcgatgagcatattcaacccattggtaatgctgtatttatcccagtctttttcgttagtattgggctgaatatgtcattcaatggtttcttgaacgatttttggttcatcgttgtgattaccgttgcggcaattgccactaagctcattggtgccggggtcggcgcacggttagcgggttttaattggttaagcggctatgagattggcgccggcatggtgtcacgtggggagatggccctgatcattgcacagataggttatcaaggtaaattactatcagatgatcgttattcggcagtcatcacagcaatcattttaacgacgctgattgcaccgctattacttcgtcaggcggttaaacgccaacgtgaagcttaaagcaattgaaaatcccaacttgtttgcgtgttgcaaacgggctgggattttttaatcacgacattattcagttgttaaacgttgatagtggacttcggcgagctgaccatatcgattggtgtcaactaattcaaagcgctgttgctggtcaattgctttaaataagggaatgccgtcacccaaaatgactggtgcaatctggatgtagagctcatcaactaaatccgcagctaacagcggcattaagacgccagcaccgccaacaatccaaatgttttggccagcagtacgtcgcaagtcttcgacgatcttcgtgacgggggtgttggtgaactgggtacgttcatcaccggtgtgggggtgggaagtcatgacaatattgtgggtcgccggattatatggattaatgagttgatcagtggtttgttccatcgtgtattcgtaagtatggcggcccatgatggcggtatcaacttgctgcataaatgcttcggtgggggcatcgttggcaccagctgttttgaacagccagtccagccgattatccttagtggctaaacaaccgtcaattgaaatggccccataaaactgaactttacgcatgattcgacacctactttatctttagtagtcatattgtaccatgttttccggtcattcacttgctgaactccggtaaaagttcagtaacataattaaataattggttcgaaatgggaggtgggaaactacttaaggtgtcgctgggagcgtatgaatactgcaaataatgatgttgcggggctaatggggatgagtattcacagcgggttaagcaggtcgtggtgatcattgtcggagaagtagcatgcggcaatcaagatgtgagtcggagtaacgattggtggttttcaagggccccaccgtccgctataattggattagcatttcatcacatacagtttggcctaattaggcgagctggcctggttcgtaaacttcccaggataaaaaaccaagaacttcagttatcggaggtaagagaatgaatgcgacgcgtaacgttattattgactgtgatcccgggatcgatgatagtttagcactattattggctcttaaatcaccggcacttaatgtgattgggattacaattgtttgtgggaacgtgccaacccatatcggtgcggaaaatgcactgaaaattttagatttggctgaccgattggatattccagtctatttgggcgctaatcgcccattagaagtcgcctacacgagtgcgcaagacacccacggcgatgatggtttagggaatagtcagattccagcggtaacggcggtacgaccgattcaagatgccgctggttttattgaagagacgctgattgaagcacctgatacttcgattttagcgttgggaccgttgacgaacattgcaacggtactgcaacgtgatccacgcttatttgaacaagtcgatcaatttacactgatgggtggaagttatcggagtcacggtaattgttcgccagtggctgaatacaacttctggtgtgacccggatgcggccaaggtcgtctttgacttgatgcctgttcccattcagatagttggtttagacgtcacgcgtaacatcgtgttgacacccagtttattaacgtatattaaagacgtcaatccagcaatgggggcgtttattgagaaaattacaaccttttattttgactttcattgggaatatgaacgggttattggttgtgtgatcaatgatccgttggccgtggccggaatgcttgacccaacgattctgagtggctttgaaagctacacgacggttgtgacggatggtgtcgcgcgtgggcagtcaatcgtggatgatcatgatttttggcacaacacacccaatagtcaaatcatgacgaaggttgacgtcgtagctttttggcggttgttcttaacgactgtggtcggtgcggctgatcctgatttaacgcaagtcttgcaccaattggtgagtgcatgaagagaataaaaacgcgggcaattacgttattggcgctctgcattgccctgaatattgttggcagtaacattgccttgatgttaaaattaccgatttatttagattcaattggtaccgttttggctgctgctgtgtttggaccactgggtggaatgttggccgggggtgccaccggagttatcgtgggtgcgacgacagacctgtactcgctgttcttcatgcccgttcaactgctgactgggttagttgctggtctgctatatcggcgaatcaagccgggcacgtggcggtcaaattggtggctagctggtgttatttcacttcccggaacacttttatccacggcgattacggtcatcttatttcatggcatcacgtcgtctggttcgagcatgctagtccaattattattaggtaccggtatgggcaaagcgatggccgtcttcttgatacaagtgggaacggattatttagatcggtttatcacagtgtacgtggtcgcacttgtttaccgcgcattgcgatataaattgccgcaagctaattagttgaacggatgacttggtgtcggatgactaaatctaagcatgtttacgctaactcgcactttttccagcgggccgaagcaggctgtctttgagctgggtaaactctagctttcgatttgtagtacctgataagttgtgtgaatatgaacaataaaaatgacctcgcaggaatattattgcgaggtcatttttgttgttatgaggttaaagtgcagtggtcaatatcgctacgaatcgcggcgactcatcttaccatcttcaatttgatagaccacgtcacagtcatcaattagccgctggtcatgggtcaccattacgatggccttttggtgctgatgagcttcgttggcgaggcgcttgacgacgtcgatggagcggggcgtgtccaggctggcggtcggttcgtctgcgagaatgacgcttggatcattgtaaagagcgcgggcgatggcaacacgttggcgttcaccaccggagaggtcacttgggtaggcatcccgaacttcagtaagggctaactctgctagtaattcatcggtgcctgcttgatcaaatttgcgccgggccattttatcgacgagcttgaactgttcacgaaccgtcaggaatggaatcagattggaactctgcaagataaagccaatttcattgaaacggtaggctaagcgctgtttttccgtttgattcgatagtggttgtccgttcagaataacttgaccacttgttggcgtttgtaaaccggcagcaatcgtcaaaaaggtggatttacctgagccagaggggccgataatcgcgacgaattggccagcactgacttcgaaattggcatcagtcaaagcgttaacagcggtatgaccgtgaccaaattgtttattaatattttgtaaggctaaaactggttgactcattgatatcatcctccttatccaatggcaacgacggggtcaatcttggcgacagtccgccatgagagtaaggcaccgacgactgcagctaacaagagagccacactataaataccaaattgtggccagtcaatggcgaatggtaatccggcgggcatgatttgcgcgaggcctaacgtaattagaaggccgatgccgataccaatgattgccatgacgacactttgggtgagtagggcagccaagatgtgtttggtaccaataccttgtacttttaagaccccgaacaaggcttgtttttgaagggtcagaacgaacatgaaaattccaatcacggctagggcaattgcgaacaagaagtaaatcatcgtgttgagtgtcaactgctcagcgctgtatcctggtaatttttcaataaacgtgacaattgataaacgttgcatgttgccatgatgttgagtcttgaaatgactctttttagtcacaaaggcgttgaccggttgttgatcgccactggtgatgggattacctttgagacgattgagcgtggcaacgtccgtgtagaccgttggcgcaatactataggtactagctttgaaagtaccgacgatcgttaccttttgatcagtggtcccaatgcgaactttctgaccaatccgatagcctttgtcttttaatcccgcggaaatcaataattgattcttgccgttgattcggtgtcctgagatgacttttggcatcagaaaactatcgcgagtggtcccaaaagcgctagcgttagtcttttgaccattactggcagttcgtaaagtaccggacagactagctaagggtgcgacgtcctgacctttgattcgatcttggtctgctagttttaattgggatgctgacagtgtctgattcgcatcttcgttcaaatagactgtttgagcatgccactggtcaacagcctgacgattaccattggataacccgttagcaaggcccgctagcataaagacgacgagggcaattagtagcaaaaccccgctaagtagcccatatctgagtttttcgtgggccatttcttttaagcctaaatacatgtcaattcctcccttttaatttcatttatcaagtgataaatcaatgtggtaatcgtatcacgttcatttttgtaaatcaaattttttatttaattaccaggctaaattatttcgaaatgggtaccaaggctggtatgattaatttattgaatagagaggcaggtaattattaatggtgaacaagcaattcaatcatcgggccgcagttattgctggtgtgactggtggtgtgatttctggtttagttaagttagggtgggagaatatcttaccgccacgaacgccacagcgggatcaaacgaatcccccacaacaattattgcaacaaattgggattcccgccagcgttacgcatgcaacgtattcatattctggtcatgatttaccaggtgtcagctatgtcatgcatttcggattctcaacgacgtttgctgtggcctatagtttatgggctcgcaagcacccccgggcaaaaggtggcagcagcgcgttgtatgggttaggtatctggacagcctttcaccatggtatcttgccagcactggggaccgttcccgctgcgaaggatcaaccaatgaccgaacacgtgtcagaagccattgggcatgttttatggatgtggaccgctgattgggttagtgccgctgtctatgaccggatgacccgttccaaatagcggtttaaatcggttagtgagtgacgacatgatgaggtgttgtagccgcagccgttgaataaagttgttgcttgaaaaactagcttggttaggaatgattacaactactaaccaagctagttttaattgtcgctattttggttaatgttcggattctgatggtaacggaaatagtgattcaccgcgacaattacgtgattatgaggaaagcaactgagattaacgtctattacaatgggaccatttgattttaatgattgattttttaatttaattctcatattgactgaaaatgtgctaaaatattaatattgtgtgcaatatttcataaaaacatccataaatgagaatggggcggaagtagcttggaaaagcaggggaagatgaagcggtatcgccagttccgattgagcttgggctggcagatcttaattgggctagtgcttggaattgtattaggggtcgtcttttatggcaataaaacggcgattactgcgatgcaaaacatcgggacgatgttcatcagtctgattcaaatgatcgttttaccaatcgtggtggcatgtctgattaccgggattgctaatatgggcgacctcaaaaagttaggtcggatcggtggtaaaaccattatctatttcgaaatcatgacgacgattgcgatcgccttagggttgttaatgggtaacatttttcaccctggtgactatatcgatattcatcaactacatgcgtcgaatattagtcagtatgtgcaaaccgctaagacggtctcacacaatggtatttggtcgacggtcatgggcattatcccgactaacgtctttaaatcattgtcagctggtgacatgattccagtcatcttttttgccgttttctttggtttagggacggcggctattggcgaacaaggcaaaattattctggactttatgaacgctgtcgccgaagctatgttcaaagtgacgaactgggtcatgcacacggctccgattggcgtctgtgccttaattggggtcacggtcgctgaaatgggcttgaaggcgctggccccgttaggctatttcattattcttgcttatattaccatggcaatctttattgtggttgtgatgggcattgttggtaagttattcggtttaaatatttggcacctactacgggtcattcgtgatgaaatggtgcttggcttttcaacggcgagttctgaagcagccctgccccgcattatcgataagatggggaaatacggtgttagtgaaggaattgtctcatttgtgatcccaactgggtatacgtttaacttggatggctccgcaatttatcaatcgttagcggcgcttttcttagctcaggcttatgggattcacctgtcactcagccagcagatcactttattgattgtacttatgattacgtcaaaggggattgctggtgtgccgggggcttcgtttgttgtcttattggcgacgatttcaacgattggcgtgccagtacaaggactcgcttttattgcgggaatcgaccggctagttgacatgggacgaaccgtggttaacgtggtcggcaattcattagctgcggtaattatcggtaagtcagaacatgaatttgatacggccaaaagtgatcagtatttagctgagattcgggcggggcatgcgcgcgcaattacgaaataattgaaaacagctctgtcagttagttctgcattaataatgcgatggcgatgatcactgatgattgatagacccaaaagttgtatttcagaaattaatttctgaaatgcaactttttttatgatatcttattctggttacagcaattacttcagcgattaagttatgataagacctataggggaggatggcgatcggatgacaactgatttttcgattgggcaactcgcacagttatttgatatcccagtggcgactttacgctattatgacgagattgggttattgacgccggcacgagtcaatccgcatagtcactaccgatattatgggacgcctcagttcgaacggttgagtaccattaaatatttgcgagcactcggcttaccattggctacgattgccgatttttttgcggcccgtgaactgtccaagctgacgagtatgttaacgacccaacagcagcaggttgaggcgcaattgcaattattaacggctgtacaacaacggatcaatacacgcttggcccagattaaaacggcccaaagtgccaattttgatgtgactgaatgcgtgacgttacctgaaagagcgatggtggctttacgtcagccttatcgccctcaagatgatattgaacttgttattgctaagctacgcgcacagaccggcgcgacgaacgaaatctttctcggcaaggttgcgctgatgctcgaccagcaagccatccaagccggacattttgaccgctatgcgggaatttgtttattatttgaaccgggtgatacggtgccaccccatcaagaacacttggcggctggtagctatgcgcagcggatttttcacggcactcatttggatgccccgatgcagtatcgacaattgttagcggattgtcgtgctcgcggctggcacgtggcgggaacagctattgagacagcactgattgattatgggattacagatcaggttgcacagtcggtgacgcagatacaattaccaatcaagacttgaccctcaagtaactttagactttatactaaatgataattaattattttaaattgaaataagcgctagagattaagctattgattaggagtggcgatatgattggagcgatttttaatacgagcatgattttagctggttgcttggtcggcagtatctttaaaaaaggaatcaagccagcttaccatgcgatattattacaagcgttagggctagcggcttgtgtcatcggcattaatgcggtcgtgcaacggatgccgcagagtaagtacccggtgctttttattgtgagcttggcgattggtggattaattggtcaagctttggatattcaagggcattttgaccgctgggtgggccgtttggcgggtggcaacttagcggaaggcctagcgactgcggtgttactgtactgtattggatcgttatcgattttggggccgattgaggcagccttaaagcatgattacacctttttgtttacgaatggcatgttagatggcatcacgtcgatcgtattagcatccactttcggatttggcatcgcgattgcggcgggcgtcttgttttgttggcaggggagcctgtatgttttagcattaattttgaaaggtgcgttgagtgcagcgttactgaatgaaattaccattgttggtggtatcttgattctagcatccggcttaggtatgttgaaaatcaagcaattcagtacgttgaacctattaccagccttgctagtgccaccaatcgtaattagcgtgatgcaattattttaactagtgggccaatggtgaagtcaattaagtcttttgattgataaagtaaaagccaccaacttaggacaatcagtgaaagctgatcattttaagttggtggctttgtgtataatgcatcgatttgagagattggcattaaatatggttaaaacggactgttttttaaatcaaaagcaaccagcttaggcccgctggaaaaaagtcgagtaagcgtaaaattgcttagttggcgcgtcctacaccgacttccaggcatttctgccaattgctggaacgcggtggacacagatttaagccgcaaaccacgtcttaaatactggtcttccactaaccaagccaaggacgcttgctaagtggaatttcaccgctgagcattggccgaaatgccttccagtcgggatagtgttcgaatggcggacaaagatgtacctaagcttttgatgaattcgtcgttgcttttcataaacgataattttgttaatcaactgtcagactgaaagtgatattgagatagctcactaatcctgaattggtgtagtaagatgtaatctctcgacaaagtgctaatgcacctaacactttgtttgaagttccagtatcaaaatagccaacgatagattgtgctaagttcggtggtcgttcatcagccattcgagcggcttcaacccgtggcccctcacaggcttgagactggaggggctgggtgacaatgatcagtagccaaattattcttagctggaagtgggttgcttccggcttagaataagactcgtatttgagatgacgcgggttgggcgttagctcaaatcgacgtcggctgcgttccagcaattgtcccccagccccggaggtcggcataggacgcgcaccggctgacggaaaataatgcagttaaacagtttgttttaaccataattcatgtcaacacgcacaatagatgtcaaagtaagacactggttagattaagtggtgtttgatgctgaagagttgacgattgcgttccagatgacggtgaatgtgatcgatgaggacgtcgtgcgaccaatcggtagttgtgttaagtggcggaacgggaaaacgttcatcgatatcgattgtcggtggcgtgatggcacagttggcgactagggcgatggcgaggctcgtaggtgtgtgctggtacatgaggtcatttcgaatcgcaaaactgatgtgctgctggttggctagtttaacgtagcgattcaggatgtcttcatctagcaagccatgtaggagtagctggtaatcaggatgggccgccatttcactttttagttcggttgagtagtcacgcatgagtgcttgggtgaaagtaatgcccacatcgattcgttcgtgaaacgtgccaaggttacggtgttgttcatccggatgtagtacgggggccccgaatattgcggattgtaagtgtttatccatttggtcttcagaattagccatgccagtcaggtcctttcacaattaaccataaaatttaactgcttttactactattgtaataaagaaagcgctttaatcaacataaaattttctaaagctgatcagaagttaaaactttggatgccactaggcttgaaacggatgacagataatctaaggacgcaacggatttgccggggccaatttaatgctgttttgaaaacaaggactcagtgcttcataaaataacgaaggtgcccagaattaggaaagttgacttcatcggcaaataacgaatattcaaggccattttgggaaaagccagcctcggccagataatctcaattataatctaagtaacggtcagggctaattcaacaaattgataataaggttactaatatatcaataaactgattaaagcagtgtgttgcttaatgattagccaggctaaccttaatccttgtcagcattgacttacggctgattatacaagccttttttttaagattgtaaaggtgtattattgattcgtccatggtatgatactacatagtatgttagtaaagtagtcaatcaaattaaaagagaaacggatggtaacaaatgccaagacatttacggaaacggcgccggtcctggacgctgatcataattgccatggtgcttttgggggtcattggatttacaagcacacaagtttctgactggattgatgcatcgtttacaactaaacaaacggatgcagctaagtctagttcccaaacgaagcccaagtcggtcaatcaggtcaagttggacgtcccgctagtgaatcaaatgacaacaccacgtttatacaatggttgtgaagtcacatcgttgacgatgttgatgaattatgcgcatatcaatgtcactaaaaatgaattagcggcaaagattacgagtgtgccactcacttatagtgacggcgaacacggaaatccagagtatgggtttgttggggatattactggtaacgatcctgggttaggtgcctatcataagccaatctataaattggcgaaaactgagactagtcaggtgaaggacttaacgggggcaaactttgatactgtgattgaacagttagaacaaggacggcccgtttggacaattacgacggcttcgtttgcaccggtcagcacaatgcaaacttggcagacaccacagggctccgttaaagtgacttatgatatgcacagcgtggtcattgttggctttaaccggactaaaaagttgatttatattaacaatccgtacggagaaaaacagcaggcagtcagctggaagaattttgaggctgcttataatcagatgggcaagcaagccattgttctgacgttaccacattagttagttaacaacatgctattgtgaaccaattagtttaagcaactaatcttggtcaagatgagccaaaatcttgatgaggattagttgctttttttgtggcggtattttcgaatgaaacggttgtaatatcccgtggtatgggtagttcgggcaccggaaagcgggtgagaaactgctaacaatatcatgattgtaaccaaactgtaattcaaatatcagcctttccagagttgttcataatattaaccataaaggggcgacgctttgttaacaagctgtaactgaattgaaatcgaattgacgccccagcccattaaaaatggcctattattggtagtataagaatgttaaagttatgggtatgtcataaactgtccttgacagtttagttgttggtgattgtgggaatcaccaacaacttatgatgataatttttttaattgcggagcacagtatggggagagggaccgcatgatggggattaaaaggctcagttggttagttggaacggcggtggtcgccacacttggcatgcaaattacggttcaagcacagggacacgcggtggtcgatatttccgagtggcaaggacagctcagcccaagtcaggtgcaggcgatgaagtcgcaagtgctatttgtgatcaatcgtcgtcagtatggtttaaattatgttgaccgggacgcagcgaataatacggcattatatgttcgttatgggattccatttggtgagtatgatttttcgcaatttacggatgccgctagcgcgcgccgtgaagcccaagcgttttatgcgcgctccaataaagctgcgcgtttttatgctttggattttgaagttaatacggtacgttcaggatcaactaatgcggcagttgcggcttggtatcgtgaaatgcgcgcattgactgacaaaaaactgatcttctattcgtatgcttcgttcgcactgacgtatgccaaccaagcgcggcaacggtttgatgcccagtggattggtgcgctaacgcccaacccaccaatcatttcggcggcgttatggcagtataccaatcgctatcatttagctgggctagcggcaccggttgataatagttgggtcattactagtgttcatcccgtttcgtggtggttggggacgacccgtggcgcacccggtgttgcgattaaagctcaaccaagactgaaagttgtgcacgatcgccatttgactatgccggcccacaatcaacagcatggacgggtgggccaagcagttgtcgccattaagaggccagcagttcagccagctgtgaagactcggccggtgcagcagaaagtggtaagcaataagtcgcgttcgcagaccgtggcgcgcgtcaaacggcggtcattgcaaacgatcagtgttaacagccatcatggcaaaataactcagcatcgcgccattcgacgccgagcgactcagcccaaagtgataaaacttaaagcgacgcgacgtacaggaacacagtttaaactgaatacgtccaaagcaactaaacttcggcggcccggtaagagtattcgaacaaaaccggtgactcgttcaaaggggcgaacgcggcagcgacttacgcgacgtcaaccgtcactgaggcagcgagtaacgaaaaacaggcaatcccgccgccgcgcactacgagtaacggtgcagcggcgagggtcgacgattcgtcgtgcaccacgttggcaacgaacacaaatacgtcccgtacataacacttctcgggacaagcgaggacttagctgattgcatggctgtcgctcagttctcattatcatggtagaaaaggtaattatggttaagtaaaatcggtcatttgttgtagaaattaggaggatatttttcatgaactttaagcgcaaaattcaattaggaatcgccactgcaactgggatgttggtggtcggaattgttgccgtaccttcagtaacgaatgtattacacgcggcttcagacagtgttagtttggttagtcagacggcagcgcctacgaccgtcaaggcaaccaatcaaacagtcaaggccatcagtgcaagtgggaccaagggaaactaccgggtgaagtacgccaaagctgggactagttcgacgactgcgacgtatcaacagacgaactacaatacgaaaagtgatgccagcagccaagtcgattacttagcgaatacgcagggtcagcgtacgacacttaattcaggtacagcggcaacggttcaagggacgatgggcaaagtgtatgttcattggaacacgggtagttggtcagtgacaacgattgccaatacacaggacgttgctggtaatccaaccaagtttgctaatcaggtcaataatcagattcaaaagcaagatttgacgagtaaaaatgtcacgagtggtgccgttaccgtgtacgataccccacaaaacggacaggcaaactcagttcaatggcaaaatggcaaacaggttgctaaggttcaaggccagcaagccaataccgttatcaaaattgcggcggatgctaaaaattaagtttttacctgggagctcaataaatgagtgccagtagtctggttatatcactgtgtcgacgtcaaccgcattcacaagccagacactatggttagattagtgggtttaatgcgatgttttgaccgaaaataggattgacttttggcagtggagtgcttatgatgttaggtaataattaaaaagtagtgatcgttaattagtagtcgttgacccaacagtctagcgactcggtgggtggtgcgaaccgagctgtggtcaaagatgaattacataacgtgaactgccattggccggatgatatccgttactaatcaatgagcgatcacatttggtgataacttgggtggtaacgcggaaaactcgtccctgttttgatgacaggggcgagtttttttgtccagcgacaataacgaggaggactaacatgaacattatcgatgatttaaaatggcgtggtgccattaaccaacaaacggatgaggccgggttaaaggaacttaccgaaaaccaatcagtctcactatactgtgggattgatccaaccggggatagtatgcatattgggcatttgattcctttcatgattctcaaacgattccaattggctggtcatcatccctacgttgtagttggtggtgggacgggtgctatcggtgatccatctggtaagaactcagaacgtaagttacagaccatggatcaagtgaagcataatcaggatggcttaagtgctcagatgtacaagttgtttggtcatgacgaaaacttttcgattgtgaataactacgattggttatcaaaaatttcattactagatttcttacgcgattatggtaagttgttcagcgtgaacacgatgctgaacaaggaagttgttgcaagccggttggaagtgggcatttcatacactgaattcacataccaaatcttacaatcagttgacttcttacacttgtaccgtgctgaacacgtgcaactccagattggtggggctgatcagtggggcaatatcaccgcggggaccgatttgatccaccgcttagaaggcaatgacgctaaggcttacggattaacaattccattattgttgaaggcggatggaactaagtttggtaagactgctggtggggccgtatggttaaaccctgaacggacatcaccgtatgaattctatcaattctggatcaaccaggatgatcgagacgtcgtcaaatatctcaagtacttcacgttcttaagtcatgaagaaatcgatcgattggccgaaacggtgaagactgcacctgaaaaacgggaagcacaacggcgcttagctgaagaagtcacggaatttgttcatggcaagcaggcggtagttgaagctgaaaatattactaaggcgttgtttactggtgatgttcaaagtttaacggcggatgaaattgaacaaggtttcaagggtgtgccatcagcagacgtctcagctgaaaagcaaaacattgtcttgtggctggttgatgctacgaaattcgaaccttctcggcgtcaagcacgtgaagatattaaaaacggtgcgattcgaatcaatggtgaaaaggtgacggatgtcgatgccgagattgatccgtccgcagcctttaatggtaaatttgtcattgtacgtcgtggtaagaaacgttacttcttggcacatgttaagtaagttaatttagcaggtggactggacccgttgtggcccagtctttttattattattacaagtaagaactggtgtaaaatttacttaggtcacattaataatgtgtgatcattgccggatgaaaatcaattgaggagatgaaagttttggtgggggttaaatttaatacacggacgattgcaatcctggggatgttgatcgcacttaatgttgttatttctatctttttccatatcccaatcccgatgacacacggttatattaacttatgtgatgcgggaatctttattgcagcactgatttttggctggcgtggtggggtcattgttggcggtgctagcggactattactagatttattgctagggtatccacagtatatgtttttctcactactcgttcatggtttagagggcggaatagcaggatatcttggtgctagcaaatcacatggtcgacagattgcagcgataattactgcggtagtggtgatggtggtcggatactttttgtcagattcgctgttgtatacgatgggaactggattggttggtgtaccgactaatttagttcaagctgtggttggtggtatcttggcattcccaattgttgcgggaattcgaccaatcgttaaacgtcatttgaatttttaaaattagatgtgctggcttaagataagcgttcgtcgtgcttttacgggcgcttttttgctgtctaaagggaatccttaattggaaaacatagtgccatctcacaatgatgttaatcgatgacatataatgtagtaattgtgtaattgacgacagttttgtgccgttcttttcataaaagtgaaaaaacattggattaattgttgacagtttcataactggctggtatattagtaaacgttgctgctacggcagatgcatctcaccaccaaataattattgaaattagttgttgacaacttcttcagtaattagtaagatagtctctgttgtcgcaatggcaactatgacaaattaatcaagttacttcttaaaaaagttgttgacaagatattgattaagatgttatgatgattaagttgtgttaagtgattaacacacggaattagatctttgaaaactgaacaaagtttcgacgaatcaaatgtgtagggtctcttgattttgagctactgttttagtaaataaaacgaccagtactgttcaggttgctgtcaacagtcgggccgttagcgtaccgggtgactgggaagtttactataacgacaaactgactgattcgattgtgtataaagtaccggtttcttatacaacgtattctacggccgttgatacgagtactgtcggtaaatatacaatcacattaacagacgcggccatggcaaccttagctcaactgaatagtagcactgtatttaataataccaatgtcggtgatggtgtggtacttgtcaaagagagcaatgcggtcactatttcacccagtaattatggggctaaagcaagtgttaataacaatgtaacagcagcgtcaattcaaaatgcgcgggataaaggaattaatctattgtatggtcagggcctttacttggtcctaccactccttaatgtcgcacaatccgaaatgacagtggataaccttacagaatatgtcattattccagctggtttcaaagtggcgacgaccggtaatggggacactgttcaggttgcaactgatccggtcggggcgttaacggctgccattgagacgatgatgacaaagaataatgtgacttatcagggattagcggtgacacagttaactgattataatgggcgccaaacgttcaaggttcacctcgaccagacggctgcttacagtaatggtcttttcgagacaatggtgtacacgctcttaccgactatcgcggttcaaagtagtggcgtgactagtggcttaattggcaaccaagtctcaagtcctgattcagcggttatatatgttaccgatgatcctaatgaaaataatggtagttattcgttaaaagatcaaaactatcctaatattgataaggtagctaaagcgctaggagtcgcggatgcggtgactataagtagcagttttactgattacttgtatacctatacactgaaggcagctgaagccgacgatatatatatgttgcaagccccagatggcagttcgttaggtattatcgtagtatccggcaacgtggggacgacttatgttcctagtcgcgaattgcaaacgataacttcttcaggtaacgattattattacttgaatccggactcaataccgcgtacacgaacttacgatagtcctgatcaaaggacctatacgctcacttaccagcgctacgtcacaacgacgactgatactgcggccaagataacgattgcactagcttcaaaagtctatgataacaacgtcacgactgatccaagtcgctatacggtatacttgccgactgaatatacggccccaagcgattggactgctgatagcgcggcgacggctgtggatgggacgacggcgtaccaagtcagtaccgactaccttaacaccactgcaatcgatcaaaacgtgggcacttacgctgtcacgctgaatagcgccgggatggcagccttatccgctgctaatccagatttcttgattgcaggcgatgtgaatgttggtgggactctgacgattactcaacgtccagtgacgattactttgccggatacgattctgtgggccaatggtcaggaacaaaatattacgccggtcattactggtgttgttgcggtgcaaagtttggattacacgttaacgtcagggttaactgatccggacacgacaaccattacggccacgctgacgaatgccgctgctaatagtaattataaattgacgaattcacctagtggtcagttgacggtgggcgccgtaacggttgtctatcagtatgggtaccgcgacaaagcggggacgctacacgtggtaacaacggctaatggaacggcgacgcacgggactgatgttaccgctaaggactatttgagctacaccacgagtgatacgactgctacgcatgccaaaactggttatacgttacagccagaaagtactggctaccaagccgatggtactttagcggacattggtggtcaggtcgtgtacacctatttagcgaacacagaaaagattgcggtcgtttacgtcgatcaagataagaacaacgtgattttatatcaggtccccctcagtgggagctttggcacacacacgaattatacgacggtgcaggacattgcggcgtatgaaaaattaggctacgtgctagcttcggatgaggtcccagcgcagcttgagtttgatcaggatactgaacagacctactacgtatacctgaaacatggcaccatcacggcgacggttgatcagccaggtaacgtggccgttagtgatttgatgaagaccagtcagcgaacgattcattacgtttatgctgataacacacccacggacttagcggatgtgcttcaaacggtcacgtatacgcgcacggcaacggtggatgcggtggatagaacggtcctttcgtacggtaattggacgaccactgtgaatagctatccggccattgagtcgccgaccattactggttacacggcggatcaaacgactatcgcggcggctgtacccgctagcatgggcgagactacggaaacaacggtccgatacagcgttaattctgaaacaatccgggttcaatttgtcgatgggactacggataaccaggtcttaggttatattgatttgaatgggaaatacggtgatgctgccgactatacggtcactgctgacattgcgaagtatgcaaaattaggctatgaaccagttcgctcggatttgcctaatcagctgatttataatcagaatgcccaagtttatacggttatactagcgcatcgtcacatgacggtcagcgttgatcatccgggccaacctggtcaggccatcgatgctgattatccagccggtcctaaatatccggcaggaactggtcgtgattcgttggaacaaacagtgactcggacgattacgtatcaatatgcgtcaggtgaatcagcggctgaaacggttaaccagtcggtcacgttcaatcgcacggcaactttcgacatggcaacgggtaagcagctgacttacggtgactggacagtggcacctggtcagtcagcactattggccgcggtcacgtcaccaacgattacaggttatcaagccagtgttacagaagtcgaagcagcgtcggtcactagtcacgataagccgcacttgattgcaatcacgtacacggccaaatcacagaccgcaaccgttgcgtttgtggatgtaacgagtggtaaaacactacctacgacggtagtaactggtgcttatggcactacgaatgattattcacccgtttcacagattactgcgtatgaaaaactgggctatcgattagtttcgaataatgttccgacgactggcatcatttttgatcaagatgacgtcattaagtcatacacggtcaagctagcgcatcaaatgacgacggtcacgccaactaagcctggtcaaccaggtcaaccaggtcaaccagttgattccgctcatccagaagggcccaagtacccagctggtactgggcttaaagatttaacaactagtgttcagcgagtcattacctatgtttacaatgatggtcaaactgcggcgccaaccgtcacgcaaacggtcagttttgagcgcaaggcgacctttgaccaagtgacaaaggtggtgacgtatatggattggcgtacacctgaatcagcgttgacggaggcatacgcagtcgttgaatcgccaataattgctggctacaccccgaacgcaacccgtgtggctagtgtaactgtcagtgccaaagatactgagtcgcgacaaacggttacttaccaagcaaatctggaaacggcgacggtgacttatgtcgatgccacgacgggccaccgactgggtacaagcgtgacgttaaccggacgattcggtacgcaagcggattatcaaccaacgacaatgattgcgcagtatacccaggcaggctatgtcttgatggggagtgattatccggcaacgggtgttacttttaatcaggcgggcgtcgttcagaagtatacggtgtacttggctcataacaaaatcgtgattacggcaccagatcagctcaccaaaacgatcacgcaaacggttcactatcaggatcaggctgggcacacgcttcaagctgatacgatccgggcgctgacgttcacgcgttctgggatgaaagatgcggtgactggtgtggcaacgtatcgtgattgggcaccgaccgggttgaactttacagccgtgtctgcgccaacgattgcgaaataccatgcgttgacggcgaccactcaggccgtggcaatcacggctgctagtgctgatgatgtccaaacgctaacatatgcgctggacgtcccaacaccgacgaaaccggtcaaaccgactaagccagccaaaccgactaagccgacaacatcggacgatttaatcaagccaacgacgaaaccaatcacggctgctaaaccaactcaactcactgagccagcaacggttgtgaaggattttcaagccacaactggcaaccagacgccagctaaatcgacaaggacgttggtatcgagtcgcattaaggctgtcaaaacagctccggcatcagcaatcatcaagccgggaagtgaagtaacggagccggctcacaaggctcaagcagatacaacgagtcgattgccacagaccggtgaaacgcggcggtctgaagcagctgctgaaacactagggctcacactagcaacattattgctaggctttggtggtttgaagcgtaagcggcatgaaaagtaatgaatttatttaactgtgcataataaaaaacgcttaacatcctagcattggcaaaaagtcaatggaaatagggtttgttaagtgttttttgttgtgtttaggtatcaatggattgatgttcaaagtagtcgattttagttgccaataactgatcgattgcttccagatgccggatgcgatcccgaatgacttgttggtactgcttgaaagcgactacttttgcttgaccatctagtgctagatgggctggtgtcaatagacttaaatcgagatctaagtcccgaaatattttaatgacttggagtgtttccaagtttttgtgggaatattgacggtaattgtattggtttcgctgaacatcaggcagaatgccaaggtgctcgtaatatcgtaacgcatctttagtcattccagtaatcgtggtgacttccttcgtagtgaagtagtgctgttgttcaggaattttaaacgttaacacgagcgtctccttaatattgagaactgagtcgccataagtcgttggccttagaacgagtgtactgcttagataacggaacttgacgtaggcggtcatcgtagaagtgtccacttgtgtgagtgagttcgggagcagtagctaaccatgcaccaatcggggaatttttacgagagaaactttcacccagtatccgaccagccaaacgactcacccaactaccgccagcaccaaagttagaatctgggacatagccggggtggaaaatgttgattgtcacgttggttgctgttaagcgttcactgagagctaacgttagtagtacgcgcgcagcagtggcctgggctgtgacggtcatggcattgtacttggatgtggccggggcgtcaaagtctggaagactcactttagcatggttaatcacgaatggcagggcaccaaccaatagaatgcgcgcttggtcactgtgctttagcaacggtaacaaggcttgaatggtccaaaaatgggtgaggtaatttaaaactaggttcaaatcataaccatctgccgataaatgtcgctcaggtagcatcacaccaatactattgagtagaatatcgatgtgatccgtcatggctgcaagctgatgagcaaattgttgaacaccagttttggtactcagatcggccaaagccaattggacagcttgattgccagttgcttgactaatatcggcttgagcctgtcgtcctttgtcagcccgactgccaacaataatcacatgatagttttggttggcaaggtcaattgcggtgtgtttaccaacgccagaagtcccaccaataataacagctaattttgattgcatgtcagtcactccttcaattcgatgattatgcacaagtataaactatggggttgacccgatagcaagcattaaattaattatgacgtgcagtagctattggcgatttagaacataatcagcagagttcttctatgctttaaacctatgaatgtgtatttaacataagcatttcacatatatagtgaacgctcgtatactgaatttaacttaataagggagggacgcatcatcaaagcaaagtatttagatcaagattatctgcaaacaattcagccaattgtcgatgctaatcagcgccgcattcaagcgttgaatgtaacccgggaaccaagtgaaattcgtgaacgtcttgcggagataacgggtcaaactatcgatatttcagtcgagattcgcgtgccactgtggacagactatgggcggaatttaaaaatcggcaaacgtgtttttattaatgataatgttcagatcactgatttaggcgggattgaattagcggatgacgtgctgattggtccgggtgcgatgttactatccgttaatcacccgttagatcctgctaagcggcatgcggttgaagttcagccaattcacattgaacgaaatgcctggattggtgctggtgccaaggtattagctggcgtcacagttggtgaaaatgctgttgtgggtgccggcgcagttgtgacaaaatcagtgccagcaaatacggtggtggccggcgtccctgctaaagtgattaaaacaattgagcaagtagattaacggaggttttataaagatgagtattaaaggtaaagtggttgttattacgggtgcgtccagcggtattggtgccgccacggccaagttgttagcggctaaaggcgctaaagttgtattgggggcgcgtcgagaagagcggttacaggccttgagtcaagcgattggtgacaacgcggtctatcaagtaactgatgtaacagatcggcaacaagttcgcgctttgattgacttggccgtttccaagtttgggcgtgtcgatgtgctatataataatgccggtacgatgccccagggtaatctgagtgaccgtgaatacgataagtggcagatgatgttgaacgtgaatattatgggggttttgaatggaattggtgaagtattgccaatcatgcaaaagcaacatgatggtttgattatcgcaacggattcagttgccggacacgttgtttatcccgcatcagcagtgtataacgggactaagtatgcggtccgggccattatggaaggcttgcgacaggaagaaaaggaacacggaattcgttcaaccatcgtgtcgccaggtgcagttcggacggagttggtcaatacaatcggcaatacgcaaattcaggccggtatcagtgagctgatgaatgcggacgatcgtcaaggattggctttaaatccggaagatattgctaacgcggtattatttgcgatcgatcagcctaaacacgtcgccattagtgaagtgttagtacggccagcacaacaggaagtttaatcattaaatcaagtgatttaaatagtcgcggcttatctgtaagataggtcgcgactattttgataggtgctactgattagataagtctacatgtggagtggataataacgttaaatacaacgacatttttagacaagtgtcgctatcgtgaatagtatggatactttgttgctgtctttgcgctgtgatcatcgttaagatagaaggcaacgaaagcctcgaattaggtgtgtcacaagtattgaatattgaggattaattaaaatagtgtagatgagcggagatggttattgatgaaagtgtttataacaggtggtacgggatttgtaggtagtgcggttgtacaagaattagtcgctaatggttttgaggtcgtcggactagctcgttctgagacgagcgctcaaaaactcattagttggggagctcagcctgtacgcggaagtttgactagtttgtcaacgttggcgacggctgctgctcaggcagatgccattattcatttgggctttaacaatgattttcggcatttttttcaggctggtgcaatggatcggcgtgccattgaaactatggggcgtgccattagtgggactaataagccgttggtcgttacgtatgggacgacgggtattagaaagcatgtcgagacggagcatgaagtcgcggatactgggctactcaaatggctcacaccgagaaaatctgagatcgtcgcacgtcagttaatggctcaaaacatcaatgcgtttgtcgtacgcttatcaccggctgttcatggtgcgggtgataagggctttactagaacagtgattgagcgtgctaaaaaaagccaccgtgctgagtactttggcttaggaacacatgcttggagtgctgttcatcggttagatgcggcgcacttgttttatttagtcacgatgtatggccttgagcatccaacaactaacgagcgtgttttcaacgcagttgccgaggaatcgatcacaaccgcggccattgcgcgtacgattagtcgtaagttaaatgttccattaaaggctaagtataatccactgagttttggcgacacagcgatgctttacctaatcaattgtccgacctccagtcagcttacacaacaaatattaggttgggttccagtacaaccagatttattaactgatattagtagttcacggtattaagtgggttactaaaaatattgtccaaggtagccgtatccgtgaatatattataaggcgcattgcccacggttatccataaggtgagtcccttgatacggccaacagctagaaaccggactagtcgttgatcatcgtcaacagtatctttacacagatggattagataattcaggaatgcatcgcgaaaggcgtcatcgttaaattgatgacgcaatgtttcttgaaaacgcgcattgccgaatgagttgagcgtttcaaaaggatgtgtgaagatctggtcaatagttagcttcgattgctgccgcttttgttcaaatagggcttccaataaatcgtactgatcttgaaagtgcttgtaaaaagttgaccgatggactaacgctgcatccgaaatatcttgaacggtgatttttcgaaagggcttgtcactcagcaggttttcatatgccagtagaatcgtggcctgcatccgttgatttctttgattagccattacgaatacctcctcgaaatttaatagaatacgattagtataacctgtccggtgtgccgatacaaagatgtggtgtaagcatttgaaattcagagcgcttataagcatgtgccctgcggcggtatagtcaagggactagaattggtaagccaaccaaatattttaatgattaatcgtaaaaaaacgagtgcaatagttggtatgttcatgcatacgacacgattgcactcgttttaaggtttatttatctccgcactaacaggtaaataaaatatggcgctccaatcaatgcgacgagcacgccggctggcagttcagtggtcgtggtgattagttttcctaaggtatcggcagctagtaataacgtactccctaacagaccagctaacggcagctgatagcgttgtcgggaccccacgattcgtcgtgccaggttgggggtaatcaggccaatgaaactgataccgccactaatggcgacactaacgccggctaacatggcggccatgctaatcaatcccaattgttggcgtttcaagttgattcccaatgtttgggcagtggtcgtaccgagtgtaaaggcgtcgagaacgggtaattgaatgaatagaataccactaccgactgcgagccatggaagcgcccagccgatataagaccaatcagtgccccacaaactaccggccaaccaattcatgacaaattgatagttatcaggtgataattttaatgtcatcaacaccattaaggctgaaaaacagccggacaaggcgacgccgaccagtaacaggcgcttagacgagatccctcgttgacgctgattcgctaataaaaaaatcagggccgtacttaaccacgccccagctaacgcaacgataggtaaactcagcgttaacgaagcgttggtgcctgcaccaataatgagtaacataacggctagtccagcgccgttattaattccgagtagactagggtcggccattggattgttggtgaccgtttgtaagacgttaccggataatgccagggcccagccaaccatgatagcgagcacgatccgtggtaagcgaaagttgactaagactagcatgtcggtcgcattaccgcgaccagttaaaattcccagcagagcgggccagctgatggtcattgtacccgtactaaggttgagaatcgctagtccgagcatgctagcagttaagagcagtgaccaaataattaagcgacgattagggctcatgctttcatcggctcctttcgtgcaaggtagatgaagcacggtaccccgattaaggagataatgatgccaaagggcgtttcatgtggcggattaactagccgtgcaatcaaatccgcaccgaccgtcagtgttgcaccaaggatcaacgttaatggcatgctattgcggtaattagcgcccactaaccaacgcgccatgtggggaatcatcaggccaacaaaagtaatcgtgccaactaatgccactgagatcccggataaaatgacggcacagatgagagctaggcctcgcagtaatgggagacttttccctcaactctgtgcattgtcgtcagtaagataggctaagtttagttgcggtgcgagtagtagggtcagtagcaatcccaagactaatcctggaccgagaaactttaattgtgtccagctgacggcacccaggccaccgaaataccagaacgcgaggtcctgtttgagctgcaacacaagggccagcccttcgctcagagctgttaataggctactgattgcaatcccagcgagtaccagaatcgtgggatcgagttgaacatggcgggcggtgctgatactgaaaatcagtccggcactggctgccgcaccaataatggcccaaccagtcgtttgtaaagttgataactttggaaaaaaggctaaacacagcgttagcattaagcccgctcccgcgttaatccccagtaagcctgaatccgctaacgggttacgcgtcactgcttgcattagggcgccgctaccagcaagagctgccccaatcaacgccgctccaaggacgcggggcacacgaatgtgccggataatttgttgatcaagattgccagtgtgtgtggtcgtcagggcgtgccagacggtggccgtacgcatctggtcagcgccaaatcgcaaactgagccccatgacgagaatgagtacgccggtactaagtgccagccacccccaatatctggacgttgacttcatgcgggggccacttcctgacagccgttataggtcaaaatcagtggggtaccgtggtagtcaacgagggtggcatcaatattgaaaattgtttttaaattagcggccgtcatgacggtggacacgggaccgtgggccaaaacgtgaccgtccttgagcgcgattaattggtcagagatgcgagccgcgtggttcaagtcgtgtaatgccataatgatagttcggtgggcctgttcgttgagctttttgacgagttgcatcacttctaattggtgagtcaaatctaagtaggtggtgggttcatccagaataatcgtgtcagtatcttgagcaacggccatggcgatccatgcccgttgacgttgtccgccagaaagggtgcttaggggccgttggcgtaaatcttggaggctggcctgagtgagcgcccattcgattttttgatggtcagttgtggtgagcccacttaacggccgccgataaggtaagcggccaaaactcaccagttcttctacggtgagatcgttagccgtttggttcgtctgtggtaagactgcaatctttttcgcaaaagttttgcttttgatttgttgaatgttttgatgatccagtagaataacgccggttgttggtggcaataggtgggcgatggcacgaatgagggtcgatttaccgctaccattcgggccaatcagcgtagtgatctgaccatgcggaatcgtaattgatagctgatcgacgataaccttgtcgccatagccaatactaatattttgggcttcaatggtattcacaaataggattcctttcttaaagttaagcgttcaaggaggttcgcttaataagttaactaattttgtttagttgtgcacaatcttattttgctagcttgcttgttgggaaatgcgattaaaacaactgctaactaataattagtgttcaattgatagtcttatcttaaatgtttttattgacaattgatagtgttttcactaataattttggtagcgcttgaaaggtggagacagttgtgacaaaacggtggcaaattgtaaaattgggattagtattggggttaacgggaagcctactattaggtgcgtgcggtgcgaagcagccgacaagcacgacagttacacgaaccgattatttgaagcataaggtcaaggtgccgaagcatccgaaacgggttgtggcgagttatttggaagatgatttagtggctttaggcattaaaccggtcgtgcagtggtcggtcaaaaatggtagtggtacgcaggcttatttgaaaaagcagttgaaaggggtgccgctaattgactattcgttaccatatgaagcggtgaccaaggccaaaccggacttgattctgatggggacgagtagtgcggtcgccaatggcaagtatgcgcaatataataaaatcgccccgacctacgtggtcaaaaatgggactacggtaacgtggcgccaaactttccttgatgtggctaaggtggttaatcgccaggctaaggccaaaaaagtccttgctaagtatgacgagcaggtccaaacgacgcgacaagcgttgaaaaagtctggtcagcataaagtggcggtgttgtgggtcaccaataataccgcctacatggtcaatgacaattcagccagtggggccttactgtatcaagatttacaattgggtgaaccaagtttagttaaacaagtgtctaagtcggccacggcggattggtcggcggtctcgttagaaaagctagctaagttagatgcggatgatattttcttagtgaatagtcaaaagagtgcgtcgctatttaaggacccgctgtggaaaaatatcaaggccgtgaaaaacaaccatctgtaccagtatggtgacagtagcagttggcagtattcgggaccaattgcttattcacaaatgattgatatggtgaagacggacttgttgaaataatagttagtcaatcattataacgaaaaataataggattgagataaaaatttaaaacgcgtaaattactcacagtaaaataagtaatttacgcgttttattgtctatagacagcggtaatcatcagcccaacgcgtgttgataggcggggactaataaatcatcgacaagtagatgaagggtggcatcagtaatcggttcattagcaaaagcacggtagcgaagccagtcgaatggcatcagttgtaagtcgcacgataaagttcccgtacgcagttccccacgttgctgtgcacgctgacacacgcgttcaatcgcatgggcatcaatctttttcacagcattgagcaagtccttaacttctggatttgcttgttgatctaggtggtgaaaccaagtgataaccaaagcttgattgaatgtattaatactgacagtgaagcgcttgagtacttggaataaatcttcagaaagtgtctgaccggtcaagttcacttcgtctagttgaccatggttttccgtaatgatttggtcctggatagccgcaattgcaagctctagtggtgaacgccagcgtcggtaaatgacaggcttactggtgccggtctgttccgcgacgttagcgaacgtcaattgttcaagaccatcttgatttaagatgtcacgggcggcttgatagatggcgttttcgagttcagcgccacgacgacgtgttttagtcatgtaatccctctttttaaataagatactttaagtttcttattgactttttctttatatagcgtattataccagttatgcaaataagacacttttagtttcttaattaggaggataatatgcaagcaaaagcaaaaatttcaaaagcaactatgacgattgcctgggtcgtagtgtttggtgcgatggcaccattattagattcaaccatgataaacattgccattaacaacttagtgactagttttcatagtagcgtgacgacggtccagtgggcagttacaggttatttactggcaacgggggtcgcggtgccattttccagttggttactcaatcgatttgatggtaaagcagtctttgtggctggtgagattttgtttggtcttggctcgatatttgcagccgtagcaccgaatattcaactattgattatcgctcggttagttcaaggttttgcgggtggcttgattatgccactcttgacgaccttgcttgtgcaaactgcgggtgcagcagtgatgggccagatgatggcaacagttgggctacccatgattttaggaccattaatcggaccggtcattggcggaatcattatcaaatttgcatcgtggcattggattttttggatcaatgtcccagtagtcttgatttcaatcgctttgattttgtggaagatgccgaattatccggcacaaaatcgaacagcgaaaatggactttattggtatcttgctactaattgtgtcctcaagtgctatcatttatagtttggttaatgccgcgcatactgaccgttttaataacgcgacaagtattgagatgttaattctaggggcgatagcgttgattagttatgtcgtatgggccgcttggcaaaaagaacgggcggtagtgccactgcacttatttaagtttgcatcatttgatggtgctggcttaggattgtttatcgctgggacggtattgaacggcgcaatgttgttactaccactctattttcaaaacgttcggggaatgagcgtgattaacgccgctctagcgctattacctcagggagcgggaatgctagtttcgcggacgttaacgggaaggctaacagatcaaataggcgctaagtacgtggttctgggaagtgtcgtcatcacgtttgtcggtaccttaccgttttattggtttggtcaacagacgtcttactggattttggcacttattttatttgtgcggggaattggtgctggtggtattttaatgccgttaatggccgatgcttatacaggaatgcaacctggacaagtgccagctgcaacaattgggaccagaattatccaaaatattggaagtgcgtttggatccgctttgattacgacgattgtaacggcgtattccacacaccaagtgaatgtgtttgaacgacacctaaaagcaggaacgtatcacgtcgacgcagctcacttacaagtctttacaacaagccatttgcaagcaattcgcttagcagcgtttcaacaaggctttctagtgattgcaattgccgcaatagttattattttgccaaccttattgctgactaacaaattgaaggcggcgaagtaacaagctaggagaaaaaataattaaatctgcttgacttatagtcggctctaacaactattattagtctcgttgacagatgtttttaactttaattcatcgaaaaggggataacaattatgaagacaattcaaattggcgctagtcagctcaaagcgtctgcggttgcgctgggtattatgcggatggttcgtttagataccgatgcggcagcgaacgtcttagagatcgttcatgaccggggcgttaactttattgattcagcggatatttatggtaacggtgattcggaacggattttcgggcaggcattaaaacaatcgagtttaaagcgggaagacttttttattcaatccaaaggtggcattgtgcttgatcctgagaagagttctggtgaactagtcttcgggcaacgctatgacttttctaagcagcatttgattgcaacggtcgataagatcttgcaacggatgcagctggactacctagattcgtttctattacaccggcccgatccgctgatggatcccgccgaagtcgctgcggcgtttgatgaattgcaagctgctggtaaggtgcgccacttcggtgtttccaactttaacccgatgcaagtcgagatgctacaagcggcaatcagtcagaaattgatgatcaaccaattgcaatttggtgtcatgcacaccggcccaattcagtttgggttgcacacgaatatgcaggatacggccagcctcaatcatgatggcgaaattatcgaatattcacggctacaccacatgacgatccaagcttggtcaccctatcaatacggcatgtttgctgggacctttattgataatccgaagtttccagaattgaatgcgaaattacaggaattagctgatcaatatcatgtgactaaaaatgcgattgcgacggcttggattttacgtcacccggccaatatgcaggtcattttaggttcaatgaatccgcaacaccttgatgagagcattgcggggaccgatgtgacgttgacacgccaggaatggtatgacgtttactttgcagcgggcaatgatttaccttaatttgaatagtccttgtgatgattaattaatcataataggtttaggttctttcgaaacggttactagtctcgaaagaacttttttgtgtgatgcaattgtggttgttataacttggtgtattgatcaattgctgaataaagtcagaattgactttattggtagttaagcggtattaatcataaaattgagtaatgatagattataaggaggaacgattatttgaacaaggcaagattagaggcgtttacagatgcgattatcgcgattgttttaacgttattagtattagacttaccgcggcctcaaactccttcagtgcgggcactctttgcggaatggcaaagtatttatgtttatatcattacatttacactattgatttcaatttggcttaatcatcacgatttattcgtgcaggtcaaaaaaatcgatcgggttgttttttgggcgaatagtttctggttgctatgtcagtcttttattccattcatggcctcatggattactaaatttccgcattcaaaatggcccgcagtattttatattcttacgggttttgtttggatgttggcttatcagttactagtagccgccgttagaagattaaatccacacattcatcgtatgagtagtccggcattaagtgttgtttttggtggctttttagtggttctaacagtcgcgttaattaatcccgatgtgggcttgttcctaatccccgttcacgcatttgctagtgttattttggcgactaaacgtaagtggcatttacgcaagtatttttaatataaagatgaaattaaaaagtaggctcatatctggtttaggctagtatcgcaatgataacgaacgacaacgcccgcaaggttgaatactgagtccaatcttgcgggcgttgccggttagtatttagttggtgttagtaggagtatgcttatggtttggtgacgattcctaggtcaatcatagattgggcggttgcaataatcgattccgcagcgggacggggatgccaatccaacaatgtttgggctttatgattgctcgtttccgcgtaggtgccaactagtgaggcgaccattcgcaattctggtcgggccttagcggctagcttaactgctgcattggggatggttttggttggtagctgactggcaaaagctggaaaggcctgtcttaagacatttgcaacgtcaagcatggatagcgtctcacccgttgtggctagaaaacgttcgccgttagcttgcggtgcggtcatggcaagcaagtgcagactagccacgtcacgaacatcaacataaccggaatcaacgtttggaacggctttaacttggccttctaagaattgttggatttgaatattggaatgtgaatatttggcggacaacaccggacccatgacggcaacgggattgaccgttgttaattctaacccgcggccctcatggttaataaagtcccaagctgctaattcagcacgtgtcttggattcttgataaggatggatcgctttccagttgagatcagaccagtcagcttcagtgtagggggtcgtacgatttttgtgaccagcaaagatggccccgtacgcagacgttaacacgactcgtttaacgcccgcatcacgactagcagttagaacccgccgaacaccgtcaacggctggtcggatcatttcagctttgtttttgaagttgagctttggggttggggaagcgacgtcgatcgcataagtggctccggccatcgcttccgaccagtgttcatcatgcgccaggtcggccacaacaatttcgagagctgataagtcggtgataccaccattggtcagcatttctttaataacgggtgctttggctaatgagcggaccgttgtgcggacggcgtagccttgttgtaataattgacgaatgatatgaatggcgataaaaccgctaccaccagtgacgacgactaattgtttttgcatgggactacctccaaatgaatttatgaattgctgttacacttgtaacgtctgtgccagtatcttacaatggggtcacgacgaatacaaggtaatcacgagcatctgtgacagaatggaggaattgttatggcagcgaccaatcacgcgcaagcaatcaaaaaggattcacaaacttatttaaccacggccttattacaattattaaggactcatgatttagatacgattacggtgacgcaagttgtcaaacgagctggggtcagccggatggccttttaccgtaactttacgacactcgaagatcttttgagcacgtatttcgccccggcgattgcagcgcggtttcaggacgtcttgcagcatgtaccggccaatcagaagttattagcgatgggtcaatttttcagtgattttgcgccgacgttacgactggctgagcaacgtggttttgaaaatattattcaacaactttttaacgctaatatgactaattattaccaagcaacgatgactaatggaatgctcacggcggtgcagcttaagtattggacaagattcatgagtgccggggtatacgcaatttggcgcgaatggctacttggcggacagttggagtccttaacaacgattcatgaaatactagcaactttgcagacggcaacgatgcaggcgctgactcaggctcaaaaatgagcagtggaagaatgatcctaaattagcggtgtgaggaggtcgaaacgccgattttagcgtgttgattgggtacttatgagcaattgtaaaagccacctagccatgcaccggcagagctcggtgcggttaggtggcttttttaatcaaatgagctgagattaagcatcttgggccgtggcagcaatgtcaacttcacggatattgacattttgcggcatgtcatacatgaacttgaccgtggcagctacgtgcttggggtccaaagtcaggccacccatggaagctttccatgcttcgtaatcggacagtgccgacttgctagtaacgtgggttaacagctcagtttcggctgcaccgggggctaccagcatgacgcgcacgttcttcggcgcattttcttcacggagtgtctcggatagcccgtggacgccaaacttggatgcaacgtaagcggcgtgattgacgaacgttttcttgccagctaacgatgacatattgagaatcgttccatgttcccggtcacgcatgtcatttaggacaatttgagtgccgtttaaaacacccatcacgttcgtattaagcatggtttgccactcttgtgggtcctgattttgaacatttcctagtaacattaatcccgcattattaactagtaagtcggtcttgccatacttggcttcggccttgcgaacggcagtttcgaattggtgatagttggtcacatcgactgtgtcgatcatggcattttcaaagttcgcagataaggcggctaactttgcttggcgacgccctaatagtaacagtgggtagttgtcagcggcgaataacttggcaatctcggcaccaaagccagaactggctccagtaatgacgactaatggtttcattttgtaattcctccgtaattttggataatggttttcgtttgaattttcaacgatttacagtatacttggctagattaaacgcgacaagtacgcacttttaggtaaccaccaattgagagcagggagttaataatgttaaaagaacgggtaactgcgcaaccacgctaccgaaatgaatttgatgccacgatgcagttgattcgtggtaagtggaaaatcatgattttgtttgaactggccgaggttaaagtcagccgttttgctgacttgcaacaccatattcaagcggtatcgcataaaacactggcgagtcaattgaaggaattggaacaagatgagttgatcgaacggcatgattttaagaccgctcagccgcatgtcgaataccggttgaccgctaaggggcagagcttgattcccatcctagatgcgatttgtacctggggtgatcaacatgttgatccagctttgattgaacgttcactgtgtgacgaataggctagtctaaacgggagcgtgggctttgtacggcgccatgggaaaagtacgttgtcagtcaaaagcaactagcggcgctgttttgatgaccattatttgttattcaattaactcgtgctgtttgaaagctgacagccagctatacgggctgttttataagatgaaccaactattgccgccgggatgggggtgggtcgttatcatagacgagtacaacgcggaatcgatgatttgaattaatcgattgccgttacggtgacagcgacgacatcgccaatgcttttgtggagttttgcacgaatatccttacgaatacctaagatataacaaatactaccatcaaggtttttaacacccatattaacgatagaaccgttgtaagggacctcatcgaaagtggcatggactttgacgcgccccttaccgaaaaggtcgcgaatatcgaagggacaggccacgtaagccccacctttgccaattgttgcggcttgaatcggtgcgtcaaattgataagtcttcattaattatatgacctccgcctaagcgtaattatggaacggcttcatttttataatcagatttccatattatcatagcaaattagcaattgttggtgaactaagtggtcactcacaactaattataattaaggtgaaccgctatttgcgtgaaatattaaccgggtatatcgttggtatcaaaaatatttatcgaaaagtacaattattatactaaatccccttgcgagcggggcaatcaaccgcttataattaaactgctttaagtaaattaaaaaagggtgttcacataaattttaaatcacaaaatccaattgatgcaagtcagtcggaaagattcaagctttataagtcggggaaactttggctggttgctggattaactttcttctcatttttaggaggttccgttcttaacaatacaaacgtgcacgctgatgctacaaatgcaacgacaacatcgtcttcagctgcaagcacggcctctagtgcaagtgttgcaacgagctctgctgctagcgatgcgacgactaaagcgacctcagtttcgtcaagtgctgcgactcaagtaacgagtgcggcaacaactaagacgaccagtcaagcagcgacggcatcgtcgagtgcggccactagccaatcgaccagtacagcatctagctcgactagtcaagcaactaagacggcttcgagtgcagccactagtacttctgcaacggctacaagccaagcaaccagtgtcgcttctagtacggcaaccactactcaagtaagtcataccgcaagcagtactgctgccagtgctgcttcaagtactgcaacggtcaaggctgttaaggccgcttcaagtacggtaagtagtgcggcgacgaccgctactaaagccacagctaaagttgctgccgttgcttataccgcggcaacgacgtcttcaacggatgtctggacgattggggatacgactcggccacgcgttgatgttgttgacgtggcgtcatatcaaagtaccatgacgcaatctgatttcaataagttaaaggctgcgggtgttaagacggtcatcgttaagtcgactgaaggcactgattacacgaacccagctgcactgaactaagcaaagatggctaacaaagctggcttgaacgttgatttctaccactatgcaacgtttagcacggctgatgcagctaaatctgaagcgactaacatggctggtttcttagttaagaacaatgtttcaaccaaagttctcttgttcgctgacatggaagattcatcttcatactcagttaacgcaacggcgaacttgaacgcgttctggtcaacgttagattcctttggttacaagaatcacggcgtttatacgtccaactcatacttatatcgggatgctgttgttaagacagttggtcaatcacgtgtatggcgggcccaatacccatacacgccttctgctaataacctttggaacaccaatgatggtgcatggcaattctccgatacggcactcttaccatctggttcagattataccggttacattgatgtcagcatcgattacaatggtttaactgaagatagtgccgggaccaatacattcgtaacgacaactagtagcaatgatacgacgactagtgaagtaacgactgacactagtgctacgaccaatacgtcaactagttcaacgactaagaaggcctctggttggtatacctttaccaagaacacagccatcaagagcgctgccagtgacagtgctaaaacagttggaacttatagcaagggtaaccgcgtttactataatgctgaaattacaactaatggtgaaacttggttacgttacttaagttacagtggtagcgaacattttgttaagattgccgcagctaaaacgaccacgactaagccagccgcaagcactagcaagacggttaccaagaatgaaactggcacttacaagtttactaaaacgacagctatcaagggttcagttagtgactcagctaagactttagggacttactacaaaggtgacacggtttattacaatgccaaggttactaagaatggtgaaacttggctccgttacctgagttacagtggtgcgcaacactacgttaagatcagtggtgcagctacgtcaacgactaccaccaagccagccactagttctagcaagacggtcactaaggctgaaactgggacttacaagtttactggcaccacggccatcaagggttcagttaatgattcagccaagactttagggacttactacaagggtgatacggtttattacaacgccaaagtcactaagaacggccaaacttggcttcgttacctgagttacagtggtgcgcaacactacgttaagattagtggtgcaaccacaacaacgacgacgtcaagcaagtcaacggctacggctagtgctaagacagttgcgcaaaccgggacttacaagtttgctaagacgactgccatcaagtcttcagcaagtgatgccgcttcaactgttgggacttactacaaaggcaatacggtcaactacaacgccaaagtaacgactaacggtcaaacttggttacgttacacgagttacagtggtgcgcaacactacgttaaggtcagtggcggtgccgcaacgaccacgtcatcttcagcaagtaagacgacggcggctgctggtacgtacacgtttaagaccacaacgaatattcggaccgctgctagtctaaatgcctcagttgttggccaatactccgcgggcgaatccgtttattatattggaacggtttctgcggatggctatcaatggctgaagtacttatctaactctggtgcttaccattacgttgctaagattggctaacaattagttaccaattactagtgcaataacaaaacaggctttgagatcacgtcaagcgacgcgatttcaaagcctgttttgttgtgtgattgagttagtggcctgttcatcttattttgacaaaagtcggcatagacgcacttgacaaaaagtttatactgattcgaacttctttcagtgggcctaagctggtagcttttgacactaaaagtttgaaacatgcttcgtattcaagcacgtgtaatcggtgttgtagtgaggggctaatgtttataaaacaactaagccgccagcaccgttgtcgtagtcaggtttctgagcagtgacaaccagtttttcgttaacaaaggccattaagcccaggctgcttaactcgcgaccgtagccggagcccttgacgccaccaaatggtagttctggtaaggaactgaggaaggtgttaacgaagaccatcccagtttcaatttgttgggcaaccgctttgccatgcgccgcagttccggcgaagacgatgccacctaagcccagttcagagttgttggctaaatcgatagctgcttgttcagaatcaactttgaagacttgggcaactggaccgaacatttcttcgtaaaagagggggttgtcttgatcgatgtccgttaagatggttggttggaagaattggccaggtaagtcgattggttcgttgccataagcaacggttgcaccaccggcaatggcccggtcaacttggtcttgtagcttttccttagcgcgtttggaattcatcggtgccagggtagtttgtgggtccataggatcgccagggactaatttggcaaaacgttccttcaactttgctaagaaatcatcgtacacatccgcagcgacaataaagcgttttgatgaggtgcagacttgcccagcgttgtataaccggacccgccatgctaagttgactgcttcgtcaatatcagcatccgctaagacgacgaaagcgtccgaaccacctaattccatagaactcttcttcaagtttgcaccggccgctttggcaaccgcttgtccaccacgcttagaaccagtcagtgcgacgccctggatgcgggggtcggcaataatatcgttaacttgatcatagtttaagaagaggtttgttagactaccagcgggagcaccagcttcttcgacaatcttggcgaaggccgcagccgatcccggtgtattagaggcgtgctttaaaatcattggattaccgaccatgtagttcggtgcgaagacccgcatgatttggtagtatgggaagttccaaggttcgaccaacatcaggacaccggttgcttgtttttcaatttcggcatcgcccgttgcttgagtgctgattggggtcggtgccaataattcagcaccgtgatcagcatagtaatcagcaatcatggcgcatagttcgacttcaccttgagattcactcagtaatttacccatgtcgattgttgcaattttagctaattcatctttatgttcacgtaacagtgcggcaatcttatggaggctggctgcacgggaactaacgggttcatgacgccattggtgataaagggcgtcgccggtagttaaggcctgttcgatttggtcagtggttgcgttgtcgtaagttttaacaacttcattggtatatggattaattgtttgataagccatagtaaactcctcctataaatgttcaggtgttgtaaacggttaatctgcgattgtatgggactggtaaccgccttcactattgtacgctaccacaaaagtacggacaaagtcagctaatttgacttgaccagcgctagtgtcagaagcatttaggtctgcataaagtccttcaggttcgcgctgataacgactagtttggactaatgaagcggcaattttaacgggaacaccgtggttcgtcaagttagcttgatattgttcatctgagatttgtacccattgtagatcgggcatgtttaaggcgtcgcgcagatcagcaacgaattggtcaccggtgaacgtatcactgaaggcatacttgacggtgataccggctggcgtgtgatcaattaggggataaacgacactggcaatgtcctcgggcgcaacgtatttttgtgctgaagcagcaggcgtgctggaataaattttatgttcagccttgattgttgctaagttaccgaacaagttagcataaaatccggttggacggacaaaagccaggttaaccccgtcaagttgtcgtaattcatgttcaattaagttgtaagcatgcagcgagccagccacttcatcggcatctgcgccgatgctactgaggttgacgacgttggtgacgccggcattttcaattgcctgtttccaaattttagcctgagccacggccccttcgaagggatcatcaccgataccaccagaaagcatgaggtaaaccacatctttgccagtaaaagtggtggataagaaatcaacatcagtcattgtaccgatagcggcatgggcgccgacagcttcaattgaagcttggcgcttaggactagttgagataacggtgacgtcatgaccggcttggacgagcttaggaacaacgatccgattaatatttcctaatgaacctaacattgcaattttcataattatagaacctctttaaaatttgatttttatttttaaaagatagatttatctttaaacgattgctagtttaaaagataaatctatctttttcaagcttgaaaaagatatttttatcttttatactgaagacatgaagaaaaaagatatgaacaaacaagttaagattcaagatgcggttgcggcaatcattctcgctgagggtccagccggggtttcaacgactaaggtggctaagcgcgtcggcattgcacaatccaatgtttatctctactttaagaataaacaggctctgatcgatagtgtctatgcgcgtgagacgaaccgaattcttagtactaccgacttagaccgattaagtgcttcaacaatcgatgtgacgactcggattcgattatatgtacagcaggtgtatgactattcgttagccaatccagatagcttgacgatcattcaacagatcaaggcattgaatggacaggggatgacgatttcggcggcggatgccgatccgaataatattgtcgctaacttattaacggcggctatcgatgctaaggtgattaagcagttaccggttagtttgcatatgggggtcgtgttttcaactattcatacgcatacgacgaatatcagtaaggaacggtatgctcaggaccaatatacatttgatgatattttccaaatgatttgggacgcgatgaaacaagattaggaggtttaatgacaaaagacgcgacttaattgataggcacgagtggatatcaattaggtcgcgtctttttttgcgttcatgtagcgactagtcgtcttgaaatgacggtttagtatcttaaaggctggttgaataattcggttcattgtgtattcttttcaagtgtcggtgagtgttttaaactgtaggtaccagtttgagcaaccaatatgtaagggggactttgatggtacagtgggcaaaacgattcagtgaaacgaaggaaccggttgtattgattagtcataatcaaaataggtgtgccggcaaaatagtggcgttaatgatgagtaggctggagttgtggggtagctgatgaagattatttttgtgcaaacgctgttcctattcttgtttgttaaggtgcttttgcgtgattggcgggtacttagtatttgggatatcagttatgcggtggtcagtagcctagtgagcggctggattttttcagtaatcgggcaatatgcagcattgccattattgggactggtggtgctgtttacttggtggcatacacatagcttcagtgagtcattatttgttagcctacaggtgattatctggtcaattgtcgtcgatcatatcagttcacttttaacgtatatgttgaaattagatgacgggtatcttttgatttttatgggattacagctggttggtttaatcacattgaatctgattttaatgaatacgcatatccagacgacgttcaatcgtcccagactgaaccgggttacggccttgctgctactcgccatctatttatacattattgtcagcgagggactcgacagtgaattgagaatggtcgtcagtaacttagttgtgttgttggtcgttatggggctcgcgattgccatctatgatgagtatcgggttacgattcgggccaagtaccaggttcaacaacaacgcctgcaaatcaaaaatgatacacggtacatgcatgaaatcgaaacgcattataatgaattgcgccggtttcgtcatgattatcagaatataatgttgtcgattaatgagtatttgaaaacggatgatttggcaggcttacagcaatattatcaacaaaatattgccccagtgaccaagcgcgtttcggatgagcagtataatctcgaagatttaagtcgtgttcaggtcaaatcggtcaagagtattctatttagcaaactcagctatgcgcaatcacagggagttaaagttcaatttgacttgaagcaagtgcttaatggggtaacgacgaatgaattagacttggcaattgcgctaggtattattttagataacgcgattgaagccacggccggtcactatcatggtgagctgatgagcgccatttttgttacggcccacagtacggtgttcttagttcaaaataacgtttttgattccttgccacctttatggcagctaaaggaagcggggtattcgactaagggacaagagcggggcttaggcttgagtcagctcagcgcaattgttaatcgaaatgaaaatatgatattggaaacgcggttattggcctcagcctttgttcagcgtttaacggtaaagcgggaatgataaaatgatcaaagtatatatttgtgaagatgatactaaacagttacaaaccttgcagcaactggtcagtaaagtgattattgagcgtcaattggatatgggatttggcctaacgagtgccgatctgcatgaaatattagcgcatgtcaaaagtcagcaaccaactcaagccgtctttcttttagatattgcgttgaattcggatattaatggcattcagcttgccagtcaaattcgtgatttaggcatccgaagtaagattatctttgtgacgacgcatacggagctatcattgacggtgtttcagtatcaagtggaagccctggattttatcttgaaggattttccggatcgcttatacgagcgattaaataccgtcttacgcgtggcacaggagcgtttcaaagctgaagacaatgatcaaaatagttatatccagatcaaaattggcgagacgattcgatcgttggacgtgcaacacgtgttattttttgaaagttcaatgagtccacataagattatcgttcatttagatgatggtgaacttgaatattacggtttattaaaggatgtgccggatttgaattctgatttttatcgttgtcataagtcatatgtcgttaatctgacccgcattcggtcattggataaacggtatcgtcgactaacgatggctaacggtgaaactgtcctgtgctccgcagcggccagtcgctacttagtacggcagattggcaaaagcaatcgctgattgaaatcttagtcgatttatattgacggcagtaaaattgcagattgcaagattcggtttgctgactggtaaaataatcgtttcagcaatttgatttccctgaaacggttatttttttacgctttattcaggtgtattgaattatgaacctgagctgggccgttccaatcaattcgcttgcgtttattttgaacttatcttcaatgggccaaataaggtcttaatgtagtgtaatggttagtccgcctgtcttaaaacggccgttgcgccgggctacactaaattataattagaggcaaccagtttgaatcaagtgggttatgttcgccacaagtacggctgttaattatgatcaaggttggcttgccattatttcgcaggtcaaatcgtcgtactggacatgggttgtctgtgatttgagcgtgacttgtgattggtcactaacgataatattggtgattagtcgtaataacttaagtgtgggagtgaatagaatgtgtggattggttgggtgcttaacggatcggcgaaaagttgataatgccgcgtatgatcaggttgtgcgggaaatgactaaaatgattgtgcatcggggtccggatgatgaggggtactttgcggatgataatatcacgatggggtttcgccgattaagtattattgatttggcaggtggtcatcaaccgctgtcatatgataatgaacgttattggctaacgtttaacggtgagatttataactatgttgagctacgtgaacagttaattcaagaaggctacacgtttaagacggattccgattcggaagtgatcttagggatgtacgcaaaataccaggccaagttgacgacctatctgcggggaatgtttgcctttgtgatctgggataagcaggaaaaaacgttattcgcggcgcgtgaccaatttggaatcaaaccgttttattatgcgattgccggggatgatttttactatgcgtctgagagtaaggcgatttataagattttaaaagataagcattttgatcaagaggcgttacaagattatttgacgttccaatatgtgccggaaactgagaccctgacaaaggaaatcaagatgctggcgccgggctgttcattaacaaaacagttgggacacgcgccgcaaatcaagcgttattatcatcgggagtttcatccagtcgtccgttctgaacaggactacgcgacacggcttaaggggacgttgattgattcggttaagatccatatgcgttccgatgtcccagttggggcgttcttatcgggcgggattgattcgtcaattgtggtggcgattgccaagcagttcaatccaaatctcaagacaatctcagtgggctttgaacgacctggctatagtgaattagacgtcgcacaggaaacggctgctaagttgaatgtcgataacgtccaaatgaccatcacgccggaagcattcatggcagcctttccacattttgtctggagcatggatgatccgttagctgatccggctgctgtcccgcagtatttcttgactaaggaagccgtcaaacacgttaaagtttgtctcaccggtgaaggggctgatgaactttttggcgggtatacgatttatcatgagcccgaatccttgaaagcctttcggtatacgaagccaatcaatggggcccttcaacggatagccgcgatgatgccagcaggaatgcggggtcgttcgttgcttatgcgggggacgaccccgttagagaagcggtacgttggcaatgcgtttatcttcaatgaaactgagaagcaacagttcatgaagcactacaatcgtgaccattcgtttcaacagacaacccgggtcttttacgatgaagccaagcactatgatttaatctctaagatgcaatttatcgatatgcacacgtggttaaatggggatttgttgcataatgcggaccggacggcgttagcccacagccttgaattgcggacaccctttgttgaccgggacgtgttcaatctggcagcggaaattccagccaacttgcgaattagccacggtacgacgaagtacattttacgaaaagcggttgaagatattgtacccgcgcacgtgttatatcgcaaaaagcttggtttcccagtaccgattcggttgtggctcaaagatgagatgtacgattgggctaaaaatattattgtgacgtcgcaaaccgatcagtattttgacaagacatatttcttaaaactattggatgaccatcgagcgggtgttcgtgataattcgcgtcaattgtggaccgtgctgaccttcatgatgtggcataagttatacgtggaagctgatatgttaatggatagtgtaacggccaatcatcttgctgagcaagtcgaaatcggttaagctgttcatattaaagctaaataagaactcgttcaacgtgccaatgagaataaaaatcatccagcgacctgattgtcttaatacaaataggttgctggatgatttattttggtggttttgtagttgtttcgttagtcgatgacgactttagtgccatacttgatgttgttatagacccacttggaatctgcaacgctcagatgaatgcaaccgtgtgaagacggtcgcttgccaagatcagcagcgtctgatttgataaagtgaccttgggcatctacgggtgtggagtggaacaaatattcaccatggttgagccatgagacccagtaataggcaccttcatcaacactagcgctataaaaatattttccccgttcggcttgcacatgataggtgccacggggtgttttgcggtcagcagttggcacgccactggatgcatacattgtatagagaacgtggtgatggttcatcaagtatagccgttgtttagccaacgatacgtgaatccataagtccggatagcggttgacattgggatacgcgactgtttcggatgattgacgccagttgattggtgtgcgcatgaccgttgatttagccgtggttttggctttcgtttttgacacgactttttttgtggttaccgttgattggctaggtctgtgggcatcaccaacaactttgacagtgccgaccgccagtaagccgataactaaagtgatgctagttaataaaattaatgttgatttgcgttgcatgttgcgcccccatagttggttggttctgtctggctctgacttgatagttagtggtaatagtcaatactgaccattcaatcaagaccttctcagtaaaagtggaaaccaatcgtatattaccgttatagctttctgaaagtgaaaatgcaacccagtcgaatgctgggtaagtcggttttacgaacaaatcggggtcgcgatagtgtaaagcgggcatattcgggctttaagtcaattaacacagcctaaaatgacaataattggtcttcaaataacactgaaaataaacaataaattccaactaaaagtaggaaggccgccggtgaaaatcgggacgattcattgctagcactctgagtcgcctattaatgaggttcctgaactagtgacggttaagtggatttaaaagatagtgacataaagaaaaacactcagcctagcgataggacaaccgaattggtggtcattgttaagccgctaagcttagtgttttcgatgaccgtttaagacgactacgggtcatttagttattaattttgaacgcaatgccggtcggtgctttttgcgggccgcgctaaccaaattagacctaacaataggactaagctaacagcaaccatgatggcaccaaagatcggtgtccagcctaagccaaggttggtcgtgacttgaccaccaataccggagccgagtgcgataccgacgttaaaagcggaaatatttaacgctgaggccatcgtaatatcgtgtggtgtattctgttcagctaactgaacaatatagagttggagcccagggacgttcatgaaggcaaagattcccatcagtaggacggtcaatagtcctaaccagtgactgtacccggtgacacttagaatgagtaaggtgatgagtaacccactgaacatcttgaatagtgcaattaagggccgtgcattggcccaacgaccacccagtgtattaccaagggcgaccattaagccgtaaacgactagaatcaaaacgacagcgctcgctgaccaatgcatctgctgttctagtagtggtgataggtaggtgtaaactacgaaggtaccaccgtatcccagcgccgtgacgagtaaggcgaacagtagttgtggattagtgagtacgcggataatcccccggaccgtggctttactgggtaacggcagattacgtggaattaaccagtaatcagctaacaaaccaatgacaccaatcatgctaataaagataaaggaccagcgccaaccgcctaattgaccaatcatcgttcccaacggaacaccagtaaccgttgcgacagtcagtcctgtaaacatgatggcaatcgccgaggcccgtttggcaggtgcgaccacgtcagcggcaattactgaggcgacggtcataaaaataccgtgagccaaagcggccacgacccggcctgcaagtaagacaccaaaggttggggcacttgctacgagtaagttaccaataataaataaaatcataattaacatcatcaagcggtgacggttaagccgaccggtgagtaatgtcatgacgggcgcgccaatcatgataccaatggcatagatcgagacggtcagcccagcttgcgccaagttgatgtgaaagttgctaacgagtagtggcattaaaccaacactaataaattccgttgacccaatggcgaaggcactgattgcgagtgcaaaaagtgtccaactgggattaaactgttttgtcataagataagcctcctgctattgctaagttgataaataatgattatactagcaagtgaattttagacaagtaccgactttaaagtgggatacccactaaaaagtaagtatggaatggagggacaattattggaaaccaaaacgtatcatattggggtcgaggccacaatggaaattattgggggtaagtggaaatcaattattctgtgccatctgcgtactcagacgatgcggacgagcgaattggaacgcgcgattccacaaatctcgcagaaaatgttagtacaacaacttagagagttggaagccgctaatattgtgacgcgcaaagtgtaccaacaagtgccaccgcgcgtggaatacggactaagtgattatggccggagtttgtccgttgtcttacatgagctgtgcgtgtggggtgaggataatattgatcgccgccgagctgcgggtgaagagattgccttgttacatcgagacgatttatagacaatgagtttaaattaaaaatggtgcgtcaagaatgaaaatattctggcgcaccatttttgattagggggagttaatgttgggtcggttgacgactaaataaacaacaaatcagtggagttaacttattgctactagctattgtgtagggatttggctaggagttcatctgcgaaactcactgggttgttactaaagaactgcgggggtattttactatgcttactaaatatatagaaattcgcacaaattctgtactaaccagatttagttttgaaacttaatattagtagtaatgactccgcttacatttttaaatggttatgataagcttagattattgacgataaatagactggagttggtgagtatgacgaaggcagttatttttgatttagatggattattgattgatagcgaggttatttcattaaagatgtatcaacgaatcgtacaggattatgggcagacgctttccatggcgacttatgcacaggaatacagtggtaagtcggcggtgacgaatatgcaacacttgattgaacgttttgacttgccgtttaatgttgatactggattaaagcgggcgttaacgttggaaaagacgtttatgcaggatggcgttgagctcaaaccgggagcacgggtgttgttacagtttttacaccggaatcattattcagtggccttagcttcatctagtatcaagtcgcgggcattagacattttgacgtcccatgatgtggcgcaatatttcgaccagtttaccttcggaccggatgtcgatcgtggtaagccatatccagatatatttttgatggcatgcgccaaactccaacaacaacctgcagattgtttggttctggaagacagtgaagctggcattcaagcggcgacgtccgcgaagattccggtaatttgtgtgccggatatgaaacggcctaaccagccctatgctgatcaggcgactgcgattgtaccgtcgttaacggatgtgataacgcatttaaaatcagttcgataagattcagttgtaattaaagcataaagattattaaattattaataaggagcggttgtccgatagaaaaactgctatactacgaggcgtaaataaatcgctgacaagttagccagtggaacgaaggagtcttgatcaatgaagaaattgatgattgctgtaactggtttagccatggtggcaacgctgggagcagcggtacccgttacagggattacagcgaatgcggcgactaagaagacaacggctacgaagaatgtcgcaccaagtttgaaggtcaatgcaatttacaataatacgacgcaaattacaggtacggcaaccaagggcgctaagatcaccgtaaaaagtacggccaacgccaagaaaaatcttggaactgcaacggcctctaaaacgacgggaaagtacacggttaaattagccaagacattgaaggcgcaaagcaatgtttatgtgtacgccacgaatccaacgactaaggcttatttctaccgcgtcatccgtgttcagactgccaaaactactgcctcttcaactaagaagacgactaacaagacaaccacgactaagaaagtggcaactaaatcgacggcggccacttcgtcatccaagaagacgactaaatcgtttaaagtcaacgcgccagcgggtacttggaagtcgaatacgactaacaagtactcccaaatcttaacgtttagcgctaagaatggatttaatcagacgctttataagaatggcaaacaagttaaaaagctggtctcgtatgcgagttatagcatgactgccaagacgccaacgttctggaaagtcagctataagtcaggctcgactactaagaccctatatttacgctatacagcaactaataagtttacggtcgttaatgctaaaaatcagatcgttaaagttaaggttggcaatgccccagcagctgtttggacgtttaccaagaagtgacgggtcgttaaatatcttaagtacgaacaattcctcggtattttggggaattgtttttttgttgcttgctgatcaattagattgaacgtggcctagtgaatattaaaataattgaaaaaacgcagatagcttatcgtcattagcaggttaggtgagcgcatataaattggccaatttgggctgttcatagtgaccatgatggaaaaggcactacagcgttggtaagtcatctagttcgctcgaaaaatgacttggtcgtgagtcacttcaaaaatgaccatcgtgcagttgtatccatgaagaatactgaataaacaagtaaatgaaaatgggtgttcgttagctgatacttatcatttaattacggttattaacacaaataatatcacggtgataaaaatttaatattcggatatctgtaaaattgtaagtctttttctgaacgtcacaaactgaaaataatgtaagataattaacgtcaagagatgttaaaatactatctatgtgaagggagcgataggcatgcaacaccggcaattatggtatcggggcggcctgggactggcactagcgctagttgtggttggatatcgtggatcacggacagttattcgggcggttccccgcgcacaattgagtgttgatcaaaaaatgccatcgactagcagtgttttttctgcttcgaaattgacgttgcaagatgaggcaaacaactcggcaccacaagtgtcacctgaggcccaggaaagttcgggacctgacaagcagtcggatttaacatcaggcagtagtaccagtagcagtggtatcagcagtggtatcagtagtggcaatagcagtggcagtacaatactggaaaacgctaaaaataatcaaacatcagaaacggcgacgaccaaagcggcagaaatggtcaatgggacggttaaaatgaccttagatactaatggcacattgcatttgagtggtgggtcatttggtgcatcgctagggtcagccacggggagttggattgtaaaaaccttgacggctaacggctatcaaccgacccaagtttcaaagatcgtcatcgacggtaagataacggcaactgctatgactaattattcatatctgtttgctaacttacctaatgttacggcgattgatgggctagccaaccttaatttaactggcgtaacggatatctcgtggctatttttgaactgttcacagttaggcgcgttggacttgaatagttgggatgtcagcagcgtcatcagaatggagggaacgtttcaaaattgtgccaagttagttacgttgaatgttgccaattggaacacggattcattacagtatctaattgacactttcaatggtgacagttcattaacgtcgttaccagttggcaagtggaataccagtaaagtggcgacgatgatgcgaacatttacggattgttcttcgctgacgtcattagacatcgctaattgggacacccgtgtcgtaacgaacatgtccgcgatttttagaggaatgtcgaaggttaagagtttacccattgataagtggcaaacgggacgcgtggttaatatgcagttagtcttttcaggtgatactagcttggaaagtattaacgtcgctaattgggatacgagtcgggccactgcgttggatgggacttttgctaagcttcctaatatcaagtccctgccactcgacaactggaatacaagtaacgttcaaacgatacggagcacattttatggcgatactaacttgacccagctgccgattgacaactggaatgtcggcaaagtctttgattttaattcaaccttcagtggctgtgccagtttaacaactgcaccggttgcgaattggaacacccagagtgccaccaatcttggttatacttttgagggcatgactagtctcacctcgttaccagtagataattggcagactggtactgtcacgaatatggccggaactttttctagagttagtcagttaaagagtctcccgattagtaagtggaatacgaagaatgtacaaaatatggcggggactttttctgaaatgagtagtgtcacggcattatcagtagataattggcagactggtaatgtgacgacaatgaggggcatctttaccaaagttagccaagttaagaatttgccagttggtaagtggaatacggcgaaggtcgttgacatgggacaagtattttacggcaacctccagttaactagtctgcccattgaaaactggaatacaagttcagccacggatttttcacagctatttgcggaagattcgggtttacaaaccttgagtctaggtgcttggaatacgaccaaagtgactaactttgaatcagttttccaaaataccagtctagacaaattagatttgactggctggaataccaacagtgcgcaaacttataccaacgctttcagttcgaagttgccgcctaaacgtctattgttgggccccagttttaacttttttaagagtgaaagttggcacttgccaaatcctagtagtgaggcaccttatattgggaaatggcgtagtttaaataataaaaaagtttatacgtcagctgatttgatgactaaatacgatggcaaaaccattgttggagaattcgaatgggccactggcaacacgattacagtgaagtatgtggacgctgctggcaagtccttggcacccgacacgaaaatcagtggtgcaactggtgatgcctatcatattaaaccaattgagattcaagggtacgtgccagatcaaccagatggggttcaaggaaactttaccgtcaaagatgaaacgattacgttaatgtacaatcctggaggactaatgtttgtctcagcaccgcagaccattaattttggtcagaatccgattactggtaaatcagaaaattacggtgcctcctatgatactgggctagttattcaagatggccggtcaataggttcaacgtggtcgctcaatgcaacgctctcagcatcaggcttcactagtaagcagtcggcacgaccattagcggctgtgctcagttataaggatcaacaaacgggtggcgagtcaattcttacgccaggtgtggcacggttgatcgtcaataaccatcaaactgtttcgaaccaaggcgtcaatatcctcggtcagaaaacggcacttggggcactatcgttacaagtgccaaccgatcgtgccttgacggatacgtatcaggcgacggtcacttggacgcttaatcaaggggttcctaatcgatgatgaaaaaaataatgattaggtaacataaaatttgtaagactgcttgattgttgttagcgagttagttatgtatatttacaatgtaccataataactattccagcttaatgattggtttcggccagggttggctttagttataccgcaaataatgatacagaggaggagtggtgttgatgaagcgtttggggttcatcacaattgccatcagtaccctactttgttgggggtggttgtcagcaccgattattggtgtggctagtacggctgagagcccagcaacgattcgcttcgacggccaggctgagtcatcgaactcagacactggcgctaatcagttacaggtgactgaagcgtcaaagtcgagtcattcgattgtgcatcagccgaatgctagtcaagctgttcatcatcagaacccggggtggttaccacaaacgagtgaacaatggtggctgagtgctttcattggtggtattgggttattggtcgttttaattggttggcaattggttaactatctaaaaaaaaggagttcattatcatgaaaaaaacattattaggacttttattctcagcagcattgattgcaacatcaggtttgaccgcgagtgcggccgatacgccacaaacgtctaatgggacagttggtttcactgggggcgacatcactattgataatggtgatacggacttagctggtgctagtcttgactttggtaccaaccaaatcaccgcagctaccaaagacgataactatgacaacacgaataagtcagcggcggtatccgttgtggacttacggggaacggctgctggttgggatttacgtgtgaagcaaaatgacgtttttaaaaacgacaaagcggttgctaataaagaattgacgggtgcgattccaacattgaatggtgttttggattcaaatgcatcgacgactggtgcggacgcaacggccaataccggtgttgcgctagatacactcaatagtgacaaggttttgatgaccgccgctgtgggtaaggggaatggtaagaacgtggctgatattgctaagtcacaactaatggttcccaagactacggcacgagctacgggaagttatagtacaacgttaacttggagcttgaatactgcaccagcgaatagctaataagtattgatcggaaaaataatggctagtaggggttaatgtcatttttccgaatcatgattagggggagaaatgatgttaacaaagagatggtggcagttaggaattggtttgctagtcggattagttagtctaagctggggacgaacgggttcggctaacacagtcggttttgaggtcgcaccggtggcttccaaatatcaaatcgataaggctgtttcatactatgatctgaaactaaagcctagccaaacaaccactttggcagtgaaagtgacgaacacaagtactcaggaaatcaccgtgcatacggcaattgtaccggcgacaactaatcccaatggggtggttgagtatcaggcaacggctgatggcaagaacattgatttgccagctgatgctagtcaactgattacgacggcggcgaataagattacccttgctaagggaaccagtaagatcgtgacttttaaggtgaaaatgccggctcagaagtatgatggtgttgtcgttggtggactgagtttcttaaaaaaggccgccaaacaacagagtaagagcgcaatggcgattaagaatcaatacgcttactcagtggcggtcgtattgcatggtgaccacgcgctcaccaagaacaagttgacattgggtaagattgatgcgacgcaaaataacgggtataaccaaattagtttacccctacaaaatcgaacggccgctttcttgaatcaagtcaaaactgatgtccaaatctatcgtcgtggtagtaacaaagtgcgctacaagcaggtcaatgaacatggtcagatggcacctaattcagtttatgccttaccgttacgggttggccgggatgcgttgaaacccggccaatataccgctaagttggccgtgaagtccaaaaagcaacattggacgttcaccaaagattttgaaatcacgcgtgatcgtgcgaaccaactcaacaaaaccgccgtgattgaacatcatactaactgggggttgtggatcagcctcggtctgctagtcatcttgttgttactgattgcttggtacattcatcgcaagcagctaaagatcaagtgattagaagaacggcttaaagataaatcataaattcatagccattagtactgttataaacggactcggtcaggttggccgagtcttttttgtgggttcggtggcaatgaatacaaatttacctttgctaacttactcattatctttttgcaggcaatgcgcagcggcttgtttctaagtataatgaaagtgtagttaacttaaaggatgtgaatgaagatgaagtatgaatggcgtaaacaagaaaaaacaacctatgctactaagaagcaaccccaactgttgacgattccagcccaaacttttatgagtatccatggaacggggaatcccaatggcccagagtttcagacgcacctgcaaacgttatatccagctgcttatgggctcaagcatgcgtataagcagtatgcgcaaacacaggcgtgtgaatttgatgattacgttgtttttccgcttgaaggggtctggtcattgacgattaagggacagcaacttgaccatcttgacaaagatgagttcagttatgacattatgattcgggtcccagactttgttcccaatgaactgattgcaccggctttggcagcggttaaagctaagaaacaactgccaactgaacaaattaacgtgcagcagttcgacgcaatgcaagtggcacagattctgcacctgggtgcttatgacgatgaacccgcgagttttgccaagatagatgaactggtcgccaatcaggggatgcatcgtactagcaagattcatcgagaaatttatttatccgatgcacggcgggtggcacctgataaactgaaaaccattctccgatatcgagtggcgtcgaattaatgcgaaaacttttgactggcattgggcgtgaagcacgaatataatttaattatattttaactcatataaaattataattaaggggtgctgatagtatgacgcaaatagagattagtgatcggctgaaagctttattggttgcgaagggctttgataagaagcaattggttttggtgacggatgatggtggtggcaagtactctttgcacgggggtgcttgcagtattggaactaaatttacgataatcgtacttgaccagccggaccccgaatacaacgtaacggtggtgaatgatcaaggcctcgcgctttggacctccacatacgatctcattttctttaacgatggtattaagatggattacgatcaggggcggatcgctattaaggacaatgctcatatgctggacaatgccgttcaaatcgctaaaggagcggaagttttagctgcttttgaacagggcgtcccagccgataacctaacttgttaattgcgatatgaagaaggcataataatgaagtcagttatttttgacgattttggtagtcccgatgtattgcgcattgctgacgtgcaacggccggtggcgacaactgcgaccgtcttagtgaaggtcatggcggtggccgttaatcatgttgatacgtttgttcggagtggggcgtttaagacggccctggcagcaccacacgtggcgggacgtgatttagtcggtgaggtcgtagccagttcgcaaccgaactttcaaatcggtgaccaagtctggacgaactcaatgggctatgaaggccgaatgggcgcaacagccgagtatgtggcggtgccaactgatcgcttgtatcacgttcctgatggcgtggcgcccatgccactcgtcgcggcggtccattcagctgcaacagccgccatcgtacttaacgacgtcatggaaattcgtcgcggccagacactcctaattgaaggtgccgcgggcaacgttggccgcaagctgattcaacttgcgcatcaaatgggcgtgacggctgtgataaccgcatcaccacgagattttgcacggtgtcagcagctaggcagtaccgcctgttatgattatcacgcggggtttgcggaccagttaacgacggatcagtggacttttgaccatgtgattgatacctcgggacgcgtaccactggcgattaatttagcgttattacgattaggtggtcaggtgacattgattacggcaccgcaggataaccaatttgagttccctgttcgccagttttacatgtctcaacaacgaatcactggttttgtgattagccatgcaacggttgaccagttagcacaagcggccagtcgtttaaaccgagcttttagcgccggactgctattggatgatcaggtcagccagcgatattttaaggatgccgctcagtgtcacgctcaattggaagcaggcacggatcatcaccagcgctttgtgttattaccgagttgattcagcataacgattgaaagcctgattaattaatcagtaatactatgtcaacaatagtattgtaattttggtgatttaaagtgattacttggcaggaggactggacagtcggctcccgcgcgtctaaagttgcgaccaatattatctgtgaaaggaccggcgtgctaacaatccgaaaggtgatcgatacggcgatctttactaatgttaatggcattcctccgtggtaatacgcagacttgaaaagaatatcgatgacgaaagtccaacacttgtcagcaagggttggactttttgtggtgcagcaccagaagcaatggcagaaaaataattaatttactacctatactagattgttgatatgaatttatttattcggatagccatcgattgttggtgaacggctttaaaggaagttcgcctaattatctcaagcaacccacgcttgataacggttacacgaacaatccgggtttgtaaatatagttaacgttatacattattagcgctgttactgaccaaccaatataatgaaaatgtggtcaaaggagtcggcatttaaattaattaatcaatcgtacaaggttattgggggaggtcacaagtgatttagtgccagtaatttatgaattgttatgagagcaatcattgttgataatgaccaccgttcttagttgatgaaagctaaacaagcgctggtaaatgaaaaagggggatttataccatgaagccaatgttaggacacttattaatggcaggaactttattattagcgggtagtacaccgattgttgccaatgctgcagaaaatcgtagtgggaatacagatatcaaagcggaatttacgaagagtacgtccacggtgacgccagttgatccatcaaatcctgatgtgccaagtactgatggcgatggtgacaacggggcggcagcaggtggcgacctgtcgctgatttttgtgtctaaatcgttaggatacgggacgcatgagctggacgttttaaatgatcaacaatataaggttgacccaactagttcatatactttgctatggcaggataagatggttgtagaagtttctgatgttcggggaaccaatgccggctggaaattaacggttaccggctccaatttaacaggaacggatggtacggctgcaaagggcgcaacgctcagtttaccaaaaggtgacgtggtcaacagcggctcggaggccaatggtgcggttgctacggcttccgaagttgctttaaatggtacggtgggatcaagtgccgtcttaaatgccgataagggcggtggttctggggtaactgttagtcgcttagatccaaaggcgttgacactgaatattaaggctaatacggttaaggcgcaggcctatagcgctaacctgaattggacattgagtgatttaccaacaaattaagcgtcatcggggcgaacggcgccccaagtacatatgtgagtaatgggggcgagaagatgcaattattgaagcgaatcatggttattgtggggacgttaattttaggcctgcaagttagcagcgttagtggattggcagccagtaacgcaagtagcagtagcagtaaaaccacgcaaagcaatgacatcgggtttagcgtggccgcgaagattccgaataatcagattgatcaacataattcctattttgatttaaaaatgacgcgtggccgacagcaacagattcagacgacgatttataacgtcaccaacgctgacatcaaggttcaaacggcgattcatacggcttatacgaacggcaatggcattatcgagtacgtgacaccaactaaaagttatgatccttctttgaagtatcgaatggaccaaatcaccaaaatacagggaccaacgaccatcacgatacccgcaaacgggtcgaaagtggtaacggcgacggttacgatgcctaagcaagcggtgaacggtgtgattttaggcggctggtattttaaacgggtcgccaataaagtcaccggaagtgttaagggttccatgaatattgccaatcagtattcgtatgtgattggactgaaatatactgctggtatagtgccacaaccacaattgaagctcgatacgattacggcgggcatgcagaattatcggcgaggggtgtttccacaattacgcaacgttactgcggtgatcgtccccaaactaacgattacggctaggttaacgagtaagaatagtggcaaggtcatcaagaactttacacagaagaatgtgcaattagcacctaactcagtttataaagtaccaattttgacagggaccaatcgtttgcaggctggttcgtatcatgtccggctagttgctaaaaataccgatcatcgatgggtgtttgataaagattttgtcatcagtacggccgcggcagataagtataatcaggcttccgttgatgattcgggaatgagcgttggctggtttattctattcggagcgttaggcatgttaattattggattaatcggtctattaatctttttctggatcaaaaagcggcggcgtgcttagttcggtcagtgaaatgggggaaggaccatgccgaataaatggtggcgattaatattaggggtaatgctcgtgctgagctgggcaataccagtgcgggcggcaacacacggtcgcactgagatcagtgtggggttttatgagactaagtatagtgctgaccggattattcccgcccgtgtgattcctgatggtggtcacccgtacgttattagaccagctgacccgggtacccagggtcagagaaatcagtcagagcgcaagccaatccgccgacaactaattatcgatggctggttgcgtgggcaatcacgcaatggtcaacaattgccccaaacgagtgagcggcttgtcattggcagtatccttggtgggatggggttgttagctagtgttttagcagacgcgttgtaccgaatattaaaacggcaagatgggggtgaacggaatgcgtaacagacgagtaaaatggttactaattcttgtattcggtatactcggcttgctgaatttgctgtccttagagggtaacgctgcgactttgacgagcaagatgacggacgtgaaagctaatgctgcttttcaggccgtaccgggtggtaattcggttggtagtagtgttgataacggtttgcaagcgtatccagcattaggcaatgtgtccgctaactatgcggataatggtcgaattacgaggcagacgacccaaattacaatgacgatgacgggttcgattaccttaaaatctagtaactcgatgtcaaaagcttattttgatattatggctggtccggcaagtgggagctacaccggggcgacattagttacggctacacctactagtcttggcagtggcaattcgattatgattagttcttcaaaacagacgcagacgttatcggtcaattttcaaaatattaaaagtgagttgccaatctatattggcttccgaatcacagtgaatggtgaggaaggtacctatcagctggggcgtttcaacgcgcagacattatctcctaaaattacggggacactttattcgactgatacgacgatcaaaggaaccgggacacccggcaatacgatcagtagtaatgttaatggtgtgacgacgacggtcggaagcgatggaacgtacacgctgaatcttgggactgcactcggtactttaagtaacgtcaccgtcactgaggtcgatgagattaccggtgataaggggacggcgaccgcagcggtgaccctcaaaaaactaaatattactagttcaaagacggcagtcgatctatatcctggtgacttagattcactgacaagtgatagcgcggtcgtcgcctggttagttaagcaagctggcatcgttgcgacaaatccggatagtgcgactgacacaattacttacgcggccgacgagactagtttagcgagcaagttgagtagtttagccgttggtagcagcaccacgatcaatatttatgggaaaggcagttctgggctgaagtcggatgctaaggcaattactgtgacgatgcgggatggaacgttgagtctgggcacattaccagcaagtttgacgtttggcaccctgacgattccgtttaaagaaacactatatcagccgacaaatgcttggaacatcactgttaatgacacacggaagaccggttcacagtggtacttacgggcgacagcaactgccatgaaatccagtacgcggaccatgagtggcaacctgatttatctgaacgcggggaacaaacaggtgctgacgaatacttcggtaacagtcagttctggcaagaaaatcgcgggtacgacgagcactaatgctgcaagtggttggtcgagcagtcagggtattttattggatgtccagcctagtgtgcaaattgacagttacagtgggacgattaattggaccttacaggatacaccttaaaaattaatataagtggttaaaagatattgcaaaagtatgtcgatttgcaatgtctttttttatgaataattaataataagattgtaagggctttattatagtttaatgcaaatttatgtttacaatatagagtaaagggtttaatgaagccgtatttctgatatagtaaagtgaactaacaaatgtattaatatgatgaggtggttggcgtgtcagcagtacttttagcgctgtcgttgatttctggcggttatgaaatgttgtttttaatgattggttttagagaatatgtcacttggcggattgccatcatttggctaagtctggttattattacgatgagcctgggggaagtggcttcaaacttatggccccaagtccctctggcttatttttggatcatcccgattgtttgtgtgaccacctttatgagttctcggttgttgtacacccagtggattttaatgttaccggtggcaatctttttgaatgcgcttaagcgattagtaggggcgatcatgggtgtcattgccaaggctgtagcccaatctgcatcgccaatgttattacggcaagcgataggtctacattcgacagcggatattaatctctttttagcgtcgattatgatgctgccggtcattattattttagggatgttagcgcatcgctggttagtacaagtgtcggccgccgatttcttgcaacgggcgcgtgttaatattagcgattacttattagttattttgttttttgctatttatattattgcgtatgtttttgcgatggaatggtcagtcaatgcgcaaacgtatatggcaattgcggctatcgtgacgtttggcattatcgggtcgtatttaattagtaataaaaacagtcacttgaatgatgcgcagctattgctacaagtctcaaattacaacgaattattaagccaccataatcgtgatttacatttgtttaaacatgattatgagaatattcttttgagcatgtcggcatttattcagaacaatgatatggccggcttaaagcgttattttacaacggaagtaatgcctgccagagtaacccttaatcgtcagtcgggactgagtgatttgagtcgcttggataagccgacggtcagtggtctaatttatgcaaaatatgaggcagccaacggtcagaacgttcatttagtggtgacaatcttagagaaagtcacgttagcggatattccacagataaaagtagtgcggattttgggtaacttgctggataatgcgacggatgctgctgcccgagcgaatcatcaagtggcgctaactgttaaaaatcgggatgctcacacaacggtattttcgattacaaatcaaattccaacgcatgaagcggtagatttatcagttatcaagaaaagtcgatttacaactaaaccaggacatttgggttatggattgagtagtattgaacaattaactacagatcaattagttgttaattattgtattgaagagggcaactttattgcagagctcattatcaaacattaaactatgattatgaatcgaaaggatctgaatttggtggcattactaacaacattacctaatattgggccaacattagccaaacaattgcaagccgttgcgattacgacacccgaacagctaaagtcaacgggtagcaaagtcgcttttactgccataaaaaaggccaacccccacgcttgtattcaattattgtattcgttacaaggcgcaattgagaattgcgcttacccacagttatcaccggcaactcgcgaagatttaaaacaattttttagatcattgctataactcatgaatggcaatgtgagcgctggtcggagaatttaacgataagcttttagataattaagaccatacttttttcactttatgtgaattggttaacataaaaatgattgctttaaagcggttatcccagattacgagggataaccgcttttgtgtattgattgttaaacaaaaaatatttgttagaatcattagtgtacagcgggattagttagcattgtaaattgtcagatggcaaatgtaaatagtattactgctagacatctgttaaaatgagcattatttttgggttaacaaattttgaccaataacgtaaaggagttacagattatggggacagaactacaatttgtacaatatttacatcaaatgcgtgattataatgatcagcacccaaccaccaaggggctgatcttattaggttacttagaacgagattttattcgattctaccgggccggaaagattgaagaaggcattcaatttgctaagaagaatctgacccgttcgcgcgatttattaaataaattatcgagtgaggaaaaacagctgcaactcagtgcgctggttgatgtcttagcttttgagggaatccaaaatcatgctgagatttatgaatttgttaagctacgtaatgattatcaccgttggttagttaaattacccgtgacgacggaacgttaccagccactagttgtgcagattattcgtgattttgccgcaattgccaaaccgaacgcattagcttataacgcacatttagagtcaacgctcgatgtgatgtactataccaatgctcacctgcatgatcaattatcggtgaaaaaggtattggcccacgtcaatgcgcggtgcaatcctgagtcagtgcggcggtcgtttagtcaagagatgcatatgtcgattcgtgattacatcaatgccaagaaaattcaggaagctgagcatatgttgttggcaacggatttaaccattcgagccattgctgctgaactctgtttctacgatgccgccgatttttcaaaacgattcaagaaggagaccggtcaaacgcccttagaatttcgacaacttaatacacgaactgattagtacttgtatttttaaagataacctttttcgcgtaaatacaaacccccgttttactcgcataaaagcaggtatactatgtctcaaaattcaaaatatgtcgatatttgactaaaattaacagaggcaaattactatgcgatatacacggggcaaatggcgcgtaaccaatcccaaggtttggttgttttctagtgttttaattttaggttggagaattgtgccgacagtggctcaagcaagtgaagctgagacggttaccatgtcgagtcattcggtgcagttagaaacggataatcaagaccaattaacagaagtagcacggatttcaaaaactgcggtaactcgtgatagccacagtgtgaccgcccagtccagcaagtcagctgacaggactagttcggagcaacctgctacgactggcactgttgaggcggtcagtccaacgactagtgaagcccaacagcggtcaacacagcaagataaaacagctgttgatcaacgggcaagtgactcaacagcagcttctgcgggtgccagtactaatcaggcgtcagccgcaacaagttctgatcaggcgccagcagccaactcaactggcactcatcatgcgattgatatggccagttcagctagcgcactaggtgctgacagtggggcccattctgaaagtttatctgaggcgcaacactcaggcgggcaaggtaagacgatcgattcagatttatctgggactgttcattcacagtcatcagtgagtactgtgacgacagctacccctgtgaactcaaattcaagcctagaaagcgacaagtttacttccacacggagccgagctgtagcggtaactgatcaaatgagtagcagggttgaaaaaagggcattgaataaaacaaatgtcactaagtcaataaacatatcagttgcaacaaagcagccgagcaagcaacggacagtcaccgcttcgtcgtttttgacaatagtaaagaacttagccgataagaactatcttgatcagtataccaaacagcatgggcaagcggctttgattgctttgatccaagattggttgtccacgtatcgaattattgcacttacaggaattacgattgtgaatagttcgtttgatggtagtgtggctacgattagtggtggtctgcacgttatcaatacgggggcgacaattcgttctggccaggatgatgaatgggagaccatcataaacggtggtttgtcagtgacaaacaatacaatcacgtttacaactaccaatggattggtggaccgtcccgtagctaatcaggatatggattttacaaagcctcggccaacgggaaatggtgcaatcaaaggtttaccaagcgttacggttgattcttcgttaatcaatgcgcaagaatttagtcaagctcagatcaatattagtgacttttatgatcaactagttactgcagggactattttatcggcaactaatggtggcacgttgagtaagatgctgattggtgagtctggaactgctgatttgggctcttatcaaggacaccattattatgccgtgaatattgatttgaatgactggcacagtggtattcggaccactggttttaataatgatgatgtggttatttataacgtcgtcacggcagcaccagcgttaaccattggtggcggtttttctagtagtacaccgaatctagtctggaacttcaatcatgacatgcgtattcagaataccacgatgataactggtaaaatcgtggcaccacatgctgtctttacaactaatcaaaatgttgattcagcggccgttttacaatatggatatggcgatggtgacagtgctattcgagagacgattacgagccaaaacgagcataattatggttttggtcaagtggttactgatgacccgttggattacttaattgcagtgattaagtcggatggtacgagcattgatactttagctggttttcgccatctactagcaaccgggcaactgaagatcacgattacagatgcggctgggacacgtttatcagggttgaatgcagttgatacacatattgcgggccagcatcgctatctaattacttaccaatttggcgatcagactgcaacgacttggttgaacgtccaaccatcgcatgagcccataatacctatcagccggataccggaatattcagcgataacgcggacgatcaattaccaagatgagcgaactggggcggtgcttgctggcccagttatacaaaatgtacgggtcgtgcgatttgccatttttaatgctaaaactcatgaattgctcggctatgatacaaacggcgacggaattgttgatactagtgatgggacaattgcatggctgttagtaccgccaacggatcaagattgggtacaggttgtctcaccagacttatctgcgcagggttatcaagctcctgatattccggtagttgcggggcaaacagtgatcattaatggtggtgatagaacgatgaatacaaatgtaattgtcaagtatcagcaacaaacgcatattgcaacgacgcagcgaacggttacccggacgattaactatatcgatggtggaacactgcaacccatcgcgtcactacatgctgttgttcaaacggttaagtatcaattattagctgtggttgctcatgacggaacgatacttggctacgataccaacggggacggacagattgagacacaattggcagatgaagcatggttgattgttggttcagggccgtggtttggcgcggttaagtcgccagatctgagccatgagggctacgcagcgccggacctaaaagtagtgccggagcagatggttgctggggtcgatgataaagatgttacgatcaatgtttattaccgactagcaactcaggccgttacggtgtatcaaaataaacggcgcgttatcagctatattgatcgacagacccatcaatcgattgccacgaccgtccagcaattggttatttaccaacgaacagcaattattgaaaaaaagactggcaaatgtttaggctatgatttaaacggtgatggattagttgatacgagtcaagctgattatgcgtggattttagttggcagtggtcaatttgccgcggtaacgtcaccaacgctagtcgtccaaggctatactgatccggacataaggactgtagcggctcaaacggtcgcgattactgatccggacctgatgacgacaatcgtgacttatgaccatcgtattattacggtaacaccaggcaatcctgctcgaccaggacagccagttgatcctgacaatccgaatatcttgtttccagatgagtgtggcgacaccgatttaacgcacaccgttactagaatcattcactatgtttatgaggatggcacgacagccgcagcctcggtcctacaaaccgtccaatttcaacgcaatgcgatgattgatttagtgacgggcgaagtgacataccaagaatgggtaccagtctcggtaacggaaatggcgggcgttatttcaccaattgtagcgggtgccacgaccacattaacagaagtggcagcccagcaggtgagtgtcacaactgccgatcaggttgtagtggttacttacaagaaatcggcaatcaaaccggaagaaccgggtcaacctgagcaaccaagtcaaccggaagaaccgggtcaacctgagcaaccaagtcaaccagaagagccggggcaccctgagcaaccaagtcaaccggaagaaccggggcaccctgagcaaccaagtcaaccagaagaaccggggcaccctgagcaaccaagtcaaccggaagaaccggggcaccctgagcaaccaagtcaaccagaagagccggggcaacacgagcaaccgagtcaaccggaagaaccgggtcaatccgaaaaaccaggagaactgcaaaaacctagtcagccagctgattctgagcaaccagatggattaagtgatcaagccaatttgagtcgtaatcaggctgaacaatcacggacgtcacagccatcacaagcagagtcagatcaaagcgttgtgcagacgaatcagcagaaaacagctgcgtccgtttcaggtattggttgggttagtgcaccggcggtatcaaaacgtatcactaagcatcatcggatgacgacccttccccagacggacgagcagaatacgcaattatcactcttggggatgattggattagcattgagttcaattttaggttggctgaagattaagtcccgcgattaacagttgtgatatgatacccgttgtgagttgcggatctttaggaaccgggattgacggggttaacgttcctttgagggacagctagttttgaatgattaatataggcaatcactgacgtttcttattaaacggtagtgattgccttttatgatatcgtcgttggtacttttgatgcggtcagttgaccggtcgaaatggcgactaataactgagcaaaggaacgtacgcggcactttttgtagtgacactaaatgtcagacatatgatagtagcaactgggtggggcgtttaaaaaattaagggttatgcctaaaaataacatttatcgttgacaattgtaaacgaagggattaatatacacatatagattacaagtgtaaacgataatgagaaagggacgaataaaatgatgattaaagtattagtcttattaattggtgggttagcaattgggtttattctgtggtggttcttcgggaagcatgctacgacaacggtcaccgcgagtgcggttgatgatttacagcaggttgatgtggaggttaagggtggctattcgccagaacaaatcgtgttgaaaaaaggggttccggcggtacttaattttacgcgcaaagatgcatctggttgtctggatcacgtggtgttcagtgatttcggtatcaatcaggaattgccacaaaatcaagttgaagcaattacgattgatacgagtaagtctggcgaatatcaatgggcctgtgggatggacatgtttcatggaaaattaatcattaaatagtgggaggaaaatcaaatgagcgcacgacaacaaatcaatattacagtagacggccattatgacccagcagaagtaacgttacaacaaggtgtaccggcccaattaacgtttacgcgcacgagtacgcaggggtgcttagagcaagtacattcaaccgacttgcactttacgactgagttaccccttgaccaaccgcaaacggtgacggtaccaactgatcgagccggtgaatttcactttagttgtgggatggacatggtgagtggcaaggtggtgattgcgtgatgagcacgacgaaacggttttggatttcattaatattttccctgccactactggctaatatgattttgatgccctttggctggatgcttccgggtggtgattggacgcagttgattctgacgaccatcattatggctgtttcggctcggccgttcttgcaaagttcgtgggcgtcctttactaagcaccatgccaatatggatactttggtggcgattggcaccgcgacggcttatttttacagcttatacgcaatggcaacggggcaagcagtcttctttgaaagtgccgcacttgtgaccactttcgttttgctcggccaagtctttgaagaacgaatgcggcacaacgcgtccagtgcggtcgcaaagctagtgggcttacaagccaaggaagcggaagtgttacgcaatcaagaatttgtaaaagtaccgttggatcaagtagtggtcggcgacattattcgggtcaagccaggcgaaaaaattcccgttgatggtgtaattacaactggccgctcaacggttgatgagtcaatggtgacgggagaaagtatgccggttcaaaaaacggtggcggacgctgtcattggttcaacgattaatagtaatgggacctttcagttcaaagctagcaaggtcggtgaccagacaatgctggctcaaatcgttgagctcgttaaaaaagcacaaaacagtcacgcaccgattcaaaagctgaccgataaagtttctgatatctttgtgccgattgtgctaattattgctatcgttaccttcttgacctggtatgttttcttgaatgctagtctcgcgaatgccttgatttttgcggtcgctgtggtcgtgattgcctgcccgtgtgcgctaggtttagctacgccgaccgcactaatggtcggtaccggccgtggtgccaagatggggatcctgattaaaaatggtgaggtcttggaagctgtcaatgacgttaaaacggtgatctttgataagacgggaacgattacggttggtcacccacaagtgaccgatgttatcggcgacgaagcccaagtactgcgcgttgccactagcttagaggcggcttcggaacatcctttagctgcggcaatattaaaacgcggcacggcccgtggtattcaagcaccaaccgccacgaacttccaagccatcgagggtaaaggtgtgactgctcaagttgagggccaattagcggtggtcggtaatcataaattattaactgatgagccgattagtgctgaattacaacgccaagccactgagcttcaggacgcggcgaaaacggtcgtgtacgtgggcttaaatcacgaaatcattggattgattgccattcaagacgtcgccaaatcgacgtctgaggtagccattgcgagtttgaaagcacgtggcttgaagacggtcatgttaaccggcgataacgaacgggtcgcacaagctgtggcggatcaagtcggtattgatgaagtgattgctgatgtgctgccaggtgataaggctgatcacgttcacgcgttccagaaggctggcaaggtggcctttgtcggcgatggtattaatgacgcccccgcgttgacgacggcggatgttgggattgccatgggttccggaactgatattgcaatcgatgctggtggcatcgtgctcgttaagaacgatctgcgtgatgttgaccgggcgttggcattgagtaagaagacgtttaaccgtatcaaacttaatctgttctgggctttcgtgtacaacgtgctcgggattccagtcgcggcgggcctcttctttgccattgggctgacgcttagccccgaattggccggattagcaatggcctttagttcattgtccgtagtcacgagttcggtattgctaaataaagctaagatcagttcgaacgcccaacctgcgtagacgatgagcagatagcgtcggatgaaatcgggcttgttaaacaagcagaaatgtgtgttaatggtacaaaatatgcgggtgtctaacgccagttcacgttgttgagctggcgttagacacccgctttttgagtcgacaatttaaggaagaaaactggctataaattcctcacaatcagtaaaaaaaagagtattagatttacactaattaagtatcatatcgttagtgtaaaattagaagaatgcccatttaacggagataagtgtggtgttaaatgcttttgtaagcgcttgaatcaaattgtgtattgtgtaacaatattaattgtaagcggtttacatactatttgaaacgagggtttgaacatgaaaattaaagcagcagtggttgataaagtaaacgatccatttgtcattaaagatgatattgaattagctgaaatgaaagcaactgatttacaaatcaaaatggttgcgactggaatttgccattctgatgaagcaattcggcggggtgatgcgtcgttaggttatccagtaattttaggacacgaaggttctggaatcgtcgaaaaggtcggttcagaagtaactaattttgaagtgggcgaccatgttattctatcattttacgctgacggaacatgtgataactgtctgaaaggcatgccaactaaatgtcggaattatgccgactataacttgagtgggactcgtcccgatggttccgaccatttccaagaaaacgggcaccatatcagtgatatgttcgaccaatcttccttcacgactcatacggtagttgaccaacgtaatgcggttaaagtaccaaaagaactagatttacgtcgcttgggacctttaggctgcggctatgtcaccggaagtggcactgttttgaacagtttacagccgcgcccaggacaaacaattgcagtctttgggactggtgcggttggtttagcggcaatgatggctggtaagatttctggctgtaccgaagtgattgcggtcgacattgttgattcacggctagaactcgccaaagaattaggtgctactcacgccattaacagtaaggaagaagatccagttgaagcaatcaagaagttgacgcatggttacggggtcgactttgccgttgatacgactggggtagaaccagttatggtttctgcaatccacgcacttgctcaaggtgggactgctgctttgattgccgttacggccaaaaatatcaccattagctcatggaacgatttgtgtgttgatgataagaaagtcattggtgttaacatgggtgatgccatccctggcgttgatattccacggttaatcgatttctatcaacatggcatgttcccatttgaaaagaccgaaaagttctataagtttgaggatattaatcaagctaatgctgattcaggtagcggcaagaccatcaaacctgtcttgatcattgatgaagattatcaaccggggaaatagctgccggctgggtgccatcagtttatgatgaataacttctaaaacggcgatgtcaaaagttgattttgacatcgccgctttttgtgttaaacacaagccgcttggacggcttgcataatttgtgattaaaacgtgccgattcttaaattcaaaaacaaccagttatggaccgctgggaaaagttcgactcagcgtaaacttgtttagttagttcgtcctacaccgacctccaggcatttctgccaattgccggaacgtggtgggcacagatttaagccgaagcccacgtctcaaatactggcctttcactaaccaagcaaaggacgcttgctaagtgaaatttcaccactgggcattggccgaaacgccttccagtcgggacagtgttcgaatggcggacatgtgcgtacccaacttttggtgaattcgtcattgtttttcataaaccataattttgtcaatcaactgtcagggtgaaaatgatattgagatagctcactaatcctgaattggtgtagtaagatttaagctcttgacagagggcttaatacacctaacgctttgtttaaagttccagtatcaaatagcgaacaacaaattgtaccgagttcggtggtcgttcattagccatttgagcggcttcccgaaacgtgttcggggccactaaagcctgtgcttgctacgccaacggactaatgccaaaacagcattaatccgttggccaggcaatgctcggcttcaactcgtggcccctcacccagccccggaggtcggaataggacgcgcaccggctgacgaataacaatctaaacttggcacgttttaatcacaaatcaggacaaattaatttgcacaatgcgtgttctgatagatattcttatctgtgtttgtcggtttattgttgcggtgtttattttgaatagcgcgtccaaacgtggggtgcatggcattgccgagtaacgattcgagttgtagagaggtcccaatcaaataatcggttcaagaatttactatgaattcttgaaccgattatttgctgtgaatgatttagttaactttgaatgggggattacttggcatcatatgcggcttggaaaatcttgatgatgtcttctttagtgcctttgcgtgggttagagaaggcgttaccgtctttaagcgcattagtcgccatgtgttcgaagtcctcgatcttggcgccaatttccttgatggaatgcggaatgccaacgtcttcgctgagttgtttcatcgctttgatagctaattcggcagcatcacgagtcgataagccatcagtgttttcgcccataattttggcgagctcggcgaaacgttcggggcacgcgattagattatattcttcaacgtagggtaagagcagcgcgcagcagacaccgtggggtgcgtcatattggccgccgagctggtgggccatggcgtgcacgtaacctagattggcgttgttaaaggccatgccggctaacatttcagcttcgaccatgtgtgtccgggcttctaggttatgcccattggcgacggcttcgcgtaatgatgtttcgattaatttgatggcctggatgcactgtgaatcggtaatcggattgtgatcgacagaaacaaagggttcgatagcctggacaaaagcatccatgccagttgcggccgtgagtcccttaggaacatctagcatgagagtgggatcgttaaaggacacgagtggcatgttacgccatgaagcaacgacgaacttataatgcgtttcttcattcgtaatgacacagtgacgggtcaattcagaaccagtcccagcggtagtgttgaccgcaatcagtggtggtagggcattcttgagtgtttcgattcctgctaacttagtgatatcgtcgccgttagtcatgatgatgccggcaccttttccggtatcgtgggcagaaccaccgccaatagtaatcagggagtccgcttgattggcttgatataaggctttaacagcttgaatgttatgaattttagggttgggttcaacttgattataaattacgtagtcaatcccggcagcatccagtgaccgccgcacctgagcaacggcgccgtctggcagactttcaagaaatttgtcggtgacgatgactggcttgtgcataccaagagttttggcacgctcgccgattttactaatgacaccaggaccgaaaaagttaacgctaggcattaagaaatcaaaattacgttcagtcatattaataacctctttttatattgtaatcgctatcattactaatttacgaatcaaattatagtcgtaataattacaatttgcaatactttttggctaattaattatatttttcacaatatcgtttagaaaaggtgcggcaatcacggcatacctgttgtaaccaagtgttaaatgacggtgaactatagtcctcatgctatttgatattactgcctacaaaaagacgactaattacaaagattcacaatcttagtaattagtcgtctttttagtgtgatccaatagaaaaattgggttagtaccagtgatgatgttgccagaaccgtttggccttgacccaggagccgtagcgcgaggcgacgtaggtattagcacgtttttcctgattgacgggtgacaagttgccgtgtaagtatgagcgcaacaattgatagcgaccgtagcagcggccattacgagccgtataactgtatccagattcacgataggcgatccaatttttggcagcgcggttggctttcgaaagcttggcgttgatcttggcaatttgctgggcttggctaagcttcttggaggcctgggcggtgattgtggtttgtggtccaagactagtagtcacgttaacgacaaccccgaagacacaactagccaaaactaatagcaacatggttttaaagttaaattttttcatgatatgtataaccccgttttatattttccctaagctgataagtgtagaatacgccaattatgtgtcagctatgttaaagaaaagttactatgttattaaatgaacgtttccgttatgaaatagtttttgtcaataactgttgcggcaattgtttagatgaataattgcgctgactatcacatgaaaaaatcataatattgttaggaaaactaaagcgctttattgccttcgttcggtaatcttaaattggaatagctttacaaaagtattaaaggagtaagtgagggagtgcaataatggcaacaaaagataatgaaaagattacattgatggcgctagtcatgatgatctttacgaccgttttcggatttgccaatagtacggtggcctattatttaatgggttacagctcgattctattttacctagtcgcagccgtactgttcttcatcccgttcgcgctaatgatggcggagttcggggcagcggttaagtctgatagtagcgggatgtacaagtggctggaagtgagtgtgaatgcgaaatttgcgttcgtgggcacgttcatgtggtttgcgtcgtacattatttggttagtctcaacgtcagctaaagtctggattccgtttacgaccatcttctttgggagcgatcaaacgcagcgctttgcgatgtttggtctgaatgcgacgcagatgattgggattttgtcctgtctatggatggtgctagtgacgttcgtttccatcaaagggatgaaaggcattgtgcgggtcacgagtttaggcggcctggcggtgaccagtttgactgcaatcctgttagtggtttcgggggtcgttttcgccttgaatcacggacaattcgcacaaccgttacaacatgtgatgacgtcaccaaatccaagttatcagcatccagtcgggttactcgggtttgccgttttcgccatttttgcttacggtgggctagaagttctcggtgggatggttgataagaccaagaaccccgaaaagaccttcccacgcggaattattatttctgccatcgtcattaccttaggctatggcctgggaatcttctgctgggggattagtacgaactggcaagccgttttgtcgaatccaacgactaacctcggtaatattagttatgtcatgatgcaaaacttgggctatgttttagggcaagcgcttggtttgagtacagcggccgctaagacaatgggactgtggtttgcacggtacaccggcttagggatgttcctcgcttacagtggggcgttcttcaccttaacttattcaccattgaagacgcttatcttgggaacacctaaggaactgtggccgaagaaatttacgaagctcaacaaagctggtatgccaagttatgccatgatggttcaatgtgccatcgtgattgtgatcatcttggtggcgtcctttgcaacggcagacgcgtcagccttttacaatgtgttgaccttaatggcgaacgtttcgatgacgttaccatacctcttcttgctatacgcgtttccgaagtttaaggaaaaccagaacattgttaagccttttgaagtgtacaagtcattggcttggacgaaaattattagttgggtcgtgttcattgtcgtcttaggcgcgaatgtcttcacgttgatccagccaatcttggaaactgggcagattcaaaatacgatttggatgctagttggaccaattgtcttcggtgtggccgggattatttggtatcaagttcgagaacggcatgtcaattaaataaccaatttcaaaataccattcgattgctgactgataaaacagcattgaatggtattttttaagtgccttaatatgggaaatttagtacactcattagcaaaagctatctagggggggatggtcatgacattgggaactgcgttaaagcaggcacgcaaagccaagcaactcaatcaaaagcaagctgcccggggaatttgtgcacaatcgatgctgtcagcaattgaaaatgatcgctacgtgccgaatgcccggctattactggcgctgtgtcagcgattaggggtcgcggttagtacgttgagcctagccgacgattttgagatcagtgccgagcaagcgtttaatgaccgcgttcggcagatgtgcaatgcccatcagtatcagcaattgaaggattggctattacagccaaccactttggaacatgttcaaacggatgagcagactcaggcttactattattatctgggtgtcgcctgttggcaggttgatcgcacatcggatgctgcacaacaaaatttacggctggcaattggtatggctgctcccagctcgccgccgacaacgttgacacgcttggccttgatttcgttagccgtcgttaaggcgcaccaccatcctcaagccccagtcgcggccttagtcacccgggcactcgctgacattgatgcgagtgcatatgaagaaaatgccaacattgttttttaccttgctgggttggtggcctatgaacaacatgattcccagttggcggtggcccgtttgacgcaggggttggcctttgcgactacacacgattcacactacatgctggctaatatttatcagttgatggcgcaactcgcaatggcggcgggggagactgccacggcgcaggttgccagtcaacggtcacaagttttcaaagacctgtttaaagaacaaattaacgaccgcctgtaaattatcagtattctgattttatgttggcgtccccaccgtgtattttataatcaccaactaaatacatgtgcacttgatctaacggtccgttattgatttggagtggttggccgtaataacgatgaccgggtcaggatgaacattgggggttataaaatgacaacagcattatttaccaatcaagtattaacacaggcaactccagcaacggtgcgagcattgctagcagatccgctgaacttaccagcatgggcgactgccattaccacggtcaagccaaccgcgacggggtacgtgttacagcggtccggttcggcttttgatcagccggaacagttgcaggttacagtcggcgctgaccaggtcgtttatcacagtgaggggggccaattgggatatgaaattgtgttcaccatgacgccattggccgagcgaactgcggtccaggaagaagtctcccttacgactacaccgccgagctggctaccgttgccactagtgaagcccgtcatgcaacgagactttcagcggaagttgggtcaattggcaacattagcggaggaacagccgaatgacgattaatgatgggatgacgttaataaaagtgttagtgacgtggtggtctgtcagttggttattacgggccactttgatcggcgttgttggaataattgcctatcgttttttgaagcagcgtcaatttaagtgagttaagacgatgacagcttttatgcctaatatctaatcgtaactattattatttagtgtgcgtttaactatcatccgaaaactaattccggtattctatgggtattcttttgaaggaggaaatctcatgaatcaaccagaattacgtgacccacgctatttatataagactgatggctttgataagcaggatcaggagacgcccgcactacaagctaagatgcgtcctgaacctgattgtggtgagaagagttaccaaggacatgataagttgttgaatcgacgcgttttgatcacgggtggtgattcgggaattggccgggctaccgcgattgcttttgcgcgggaaggtgctgatgttgcgattcagtacttgccgggagaggagccggatgctgaggcggttgccgaactagtgcgcgctgcgggccgtcaagcgttattattaccttgtgatttcaaggatgttgacgttgtgaccgacctcgtggaccggacaatcgctgaatttggtggtatcgacacccttgtcctaaatgcggggcaacagatttcacaaccttcactggctaagctgccgatcgaacaggtgcgtgcgaccttcgaagtgaatatcgtcgcgatgtttgcgttggctcaggcggccttgccaaagatgcccgctggcggtagcatcgtcaccacgacttcgattcaagcctatgcgccgagtggtcatctattagattatgctgcgactaaggcggccatcaagaactttacgattaatttagcagccgaagcggccgaaaaggggattcgggtcaatggcgttgctcccgggccaatctggacgcccttacaactagatcaaggccagccaatcgaggcgctgccgaaatttggccaagacaccttgctcaaacgagcgggacaacccgcagaactggcaccagtgtacgtctttttagcttctaacgacgcgagctatgtgaccgcgcaaatttatggcgtgactggtggcggcgtgattaattaggtgttcactgcaagttaattcctgattggcttgaataaatcataagtggctaccttggatggatacattcaaggtagccactttagtgtgtttaatgatctgatgaggcgttcattaagtaatccagcgctgccgttcccaccgctttggctgcaattagtaaacagtcttcattcatcataaaatcagggctgtggtgcgggtgggactcacccggagctggttgacagccggcatagataaaggtgctgggtttggcttgtgcaaaataggcgaagtcctccgaggggtcttgggggccgcagtcgaatattttagtaatttctggaatctgagcagcttgaatactggtgatgacgcgctgtgtcagggttgcatcattcatgagtaccggataattatcatcgtaatcaagcgcagcttggacaccgaaagtcgccccgacaccgttcgcaattttaataatctggtcacggattgtctggcgcgtggtttcgtccataatccgtacatcgcccttgagggtgacttgcgctttgatcgcattgaaggaaccgacgccgtcgaatgagccgatggtgacactgccggtatcaaatgggtcaatccggcgggaaataacggtttgtaaggcggttacaaagtaacttccagcaacgattgcatcgtttgagaggtggggcatcgaggcgtgcccacctttacccgtgaaggtgatcgtaaaattagcccgcccggtctgcgtcgcatttaagtgataggcaatcgagcccgtcggcatggtactcatcacatgcagcccaatgacgttatcgatgccgtctaggacgccagcagccaacatacccttagcaccacccggtgacacttcttcagcgggttggtggataatgcggacgcgaccacgtagctgatttttcagcccgagtaaggtcttcgccagtaccatgagataagcagtatgaccatcgtggccacaggcgtgcatgacattggcgttttgcgatttaaatgataagtggttgtcttcttgaatcgcgagggcgtcaaaatcagcgcgtaatgctaactgaggtccagggtgaccgctatcgatgtcgacgacgaagccgtacccatcaccataagcggtggttgagacgcccagttcacgatagaacgctttgatgtaggctgcggtttgttcttcatgaaatgaaatctcggggtgggcgtgtaagtggcgacgaatcttgatcatttccggctccgccgccgtgagttgttgcatgagttgtgcttgaagggtcattagaatcttcctttctgattgttagtcaggtgctatcgttagtgtatcatcaaataagaagattagtggcaatcacgcaatgagttagatcaataaattatggggcgtgaggtgtattaggaacattgattattactagaagttgggaccccttatttaatattaattcttattataaagtctgcgataactgaatgacgttattaggtgggatataaccgaacatcgtattcattatttctcgcacatatactgaattattatcatcgtaatctgattttgcaaaagatatgatatattgattgtcctgactgttaatttcaggtaccctaaacaggagaccacaattatgaggaggaacgattgatgaagattttgatgccatattttaagcggtatcgactagacgtctggattgcgatgctgtcggtcatcgtcttagtgtttgcgacgttatggcaaccgcgattattgcaagtcattatggaagccattatcaagaatgatcaggctacggtattccgtgaagggctgatgttgcttggtttggccgtactgggaatcattggtgggatcgtgaatacgatatacgcagcccgggtggcccttggtgtggcgaccgacttgcgagctgacctatacgctaaggtccagtcattagcctacgctgacgtggaaaaattttcaccgtccaacttagtggtacgaatgacgaacgatattaatcaagtccaacagattgtgatggctggctttcagcagattacccggattccattactattcatcggggcactgattctcgctgtgatgacgatgcctgagcagtggtgggtcattgttgtcatgatggcggtaatcttaggggtcgcactgattgcggtgcggcgaatgactaaatactttgcacaaacgcaacaagatattgaaaacgtcaatacggttgcccgcgaaaacttaatggggattcgggttgttaaatcgtttgttcaagaaccaaacgagatcaaaaagttttcggccgcatccgatgaattaaccgctgtgaccgctaaaattgggtactggttcgctattctaatgccagcgttctttttgacggccaacgtggcggtcggggtcgccgtttacttggtcggtcaaacgattacgacgcacccggcctatttagcagctattacgagttttatttcttatttaatgcagattttatttgccgtgatcaacgggggatttctcatgacttttgcgtcgcgggccgtcatctcacttggtcgaatcggcgaagtgatgactaccgaaccaagtatgacctacgttgatggcgacgcggcgcccgtagctggtgatattcactttgaccacgtaaccttcacttatccgggagatgcgcagccaacgctaaaagatgtgacctttacggtaaaagcagggtccatgctgggaatcgttggggccactggatctggtaagacgacgttggcccagctgattgcgcgcttgtatgatccggatagtgggacggtctccatcggtggaattgatgtgcgggccttaccagaaaaagcccttcgatccacggtggcctatgtcttacaacggtccacgttattttctggcacgattgcgggtaacttacggcaagttaagccggacgcccagcctagtcacatgcaatgggcggctaatattgcgcagtctgcggaattcattgaacggttgccacagacgtacgatgcccccgtggaagaacggtcacagaacttttcgggtggtcagaagcagcgactagcgattacgcgtggcgtaattgccaatccagaaatcttgattttagatgatgcgacttcggcactcgatgcgcgttcagaaaaacttgttcaagaagctttggatcgcgagttgaagtcaacgacgaccgtggtcattgccgaaaaaattgcttcaattattcgtgcggatcaaatcttagtgttagataatggtcgcatttcgggccaggggactcaccacgaattgcttcaagatagtgcgatttatcgcgctatttaccaaacgcaaaaagcacgggaggagggcttacatgagtgatttacgcaatgctggtaaatattactggcactatttaaaacgctactggttaggcttcttactaagtgtgattctgattgccttttcgacttggtgcattgtggtcgcaccgacttatctgggacgagccgtggaggagctgacgcagtacttgcagcagtggacgaatcaagcgactcgggcacaagcaagcttgcaaccgttcaaccggaccctgatcatctacgtcttgttgtatgtcggtgatgctagcacgatttttattgcgagcttgatcttagcacgcgtgacggccttttcgaccgggacaatgcgggtaggcctatttcggaagatgcaacggatgaaggttcaatactttgatacgcatagtgacggggatattctggctcggttcacctctgacctagataatatttttaatgccatgaatcaagccttgctagaaattttattagccgtggctcagtttgttggcctgctaattgtgatgtttaatcaaaacactacgatggcgtgggtgacgatggcttctacgccggttgcattaattatcgcggcgtttgtcatgcacaaggctggcgtcgcggtgaaccaacaacaggatgatatcggtcaactgaatggttatatcaatgaacaaattaccggtcaaaaagtcttgattaccaacggcttacagcaggactccttgaaaggctttcatcagtataatggtaaggttcgccagtcagcgttgacgggtcaaatctggtcaggtattttgaatccactgatgcaagggatgtcactgcttaacacggcaattgtcatcttctttggctcatggttagcgctgaatgggagtatgtcgactggagcagctttggcgctggtcgtggtgttcgttaactacgcccaacagtactaccagccaattatgtcattgactagtttatatagtatgattcagttagcgattactggtgcacggcgggtcgatgaagtccgtaatcaaccggatgaagtgagccccgctaacggtcaagcgctcgacgggattcatgatgaattactgattgataatgtgcgctttagttacttaccaggtaaagaaatcttgcatggcgtgtcgatccatgtgcaccgcggtgagatggtggcactcgttggcccaactggttcggggaaaacgacggtcatgaatttgttgaatcgcttctatgatgttgatagtggtgcgattacgtttgatggggtgaatattcaagactttgatctccaggtgctacggcaaaatgtcgggattgtcttacaggaaccccagttgtttacgggcacgattgcggataatattcgttacggggacccaacggctagtatggatcgggtcatcgatgcggcgaagcaggctaatattcatgactttgtgatgagcctgccagatggctatcagacgcgcgtttccgacgaacagagtattttttctgccggtcaaaagcagttgatgtcaattgcccggacgattttaacaaatcccaagttgctgattttggatgaagcgacttcgaacgttgatacggtgacggaagccaatattcaagccgcaatggacaacgtcatccaagggcgaaccagctttgtcattgctcaccgcttgaaaacaatcctgaatgccgataaaatcgttgtattgaaggatggtcaaattattgaacaggggaaccaccatgatttattagcggcaaacggcttctatgcggaactgtatcgtaatcagatggtctttgagtaatgaaagtataaggagtcggacatggcagggcaagagcaacaagtgcgggtttcaatcccagtctcagcattaaaacgagccgggattgatcgcgatgatcagttacagttaaaggtgcgcaatgacgcactagtcttagagaagattaagccacgtcaaccacagtggcagcaatacttgataatctggccgctgttggttgcaatcctatcggggttagccagttacgggtactggtggtttcaaaaagtgcgaccagttccactgacaggtgcgcaatcaatcgggagtttgacgattgtggccggtgtggttaccggcgcagtgctatttgtcggctttttcttaaaaacgcgtaatgatccagaaaatcgattttcgcgccatatttattggcggaactttccagttattacgattgcgtttattatgatcttagcctttgcgctggtcggggctttctgggtattagaattattatttccagatgtcatcttcgatcgctttacatctatgttgctactggtcttgtttacgtattttgcggatgcgttcatgattagcgctgcgttgacgataaatgcgcggtcgttatcaacgattttaacggtggtgattgtcagtggctgtgttatctcaatggccgccaatggtcaacggcgatggtggcagcataatttaagctttttagggacgcatgccgctgaaaattcctggcaattcaacttgacactgattttttcggcgttattgatggtcgttctgattgactatctatttgtttcacttagtcgaatttatccgcgtacttggcgaacgtcaaccttgcggatattgttgacgttgaccgctgtcgatttcggggcggtcgggctatttcctaacaacctgacgtttcactggttacatgacttagttgctggtggcttggtcacgttgttagtcttgttgattgtgggggtgcggtggctattaccagccgtgacgaaagattttctgtggctctcatacggcgttggcgtggtgctattactactcaactttggttttcgctggtttgggtatccatcgctgacggcatttgagattcaagcctttgcgatttcgtttggctggttgctgatgctattttcacgtctacaagcgttagtcaatgaagacccggaattgttgacgattaagttggagcaggaaagtacggcagggcaataagtgccacgttgttttgaaacggtggctgagtatattaataataattgaatcagataaaactggctgctagacacggtttaaagtgtctagcagccagttttattaattatggatgattgttgaagcgggttaggtgtaattgattacttttaaatgttcacatttagcgatgctgagccatcaatttgacttgtggcaacatgttatcagtgcccggttgagaaataccaaggctggtattttcgtatgctgttggctcagcaataatcttcatgattaaatcagcaatactagcgcgtgaaatcatggttcctttgaagcgttcacctttgtaagtcagttcatagtcaattttggtatcgtcggtcatataggccgcacgaataattgtagcaggaatatccgatgattcaattattctggccgcatgtcgcgtatcgtttttagcagcgtgaccgactacctgttcgacccaagcgccaaatggattaggggtttcgtggtagagtccggatcctgtgacccaaataagatggggcacatgattgcgattcattgacgtgataatggtctgtgccaataatgccatattcccggctagatttgcatagacgatatcctgattaggcataacagtgtctagtagctgtgaatcactgacatcaccttgaataaccgtttctcgttctggtgaagtgactagtaggcgccctgcatttcttaagactagtgtcaactggacgtcagtttcggctaagagtcgttgttccacaatccgcgcaattcgaccgttagcccctaaaattaaaaccttggtcattctgatcctcctcgtattagtgaatagtgtaaccaccgtcaacagcgacggcttgaccaaccatgtaactggcagcatcactgcaaagaaagagcacgacttgagcgacttcttctggtttagctaaacgccccatgggaatttcgcggactaggtcgtccatctcctgtcgttcagtatcatccattcgggcaaccattggtgtatcaatgattcctggacacacggcgttgatccgaacattccggtcagcgtattctaaggcgctactctttgtcaggcctaagacgccgtgctttgaagcgtggtaggcagttcgatcagcaataccaacgagaccacccattgaagaacagtttacgattgcggctggtgttccctgagcacgcatctgtcgtaattcgtacttcatactgagaaacatgccttttaagttagtatccatgacatgatcatattcttcaaccgatagatcggcggtatcggtgactggactttgaatcccagcatcgttataagcatagtcgaggtgcccaaactgagcaactgcgaatttcaccattccggcgacgtctttgggatcagcgacgttacacttgaatgaaacggctgagtagccatgatcgactagctgttgggcttcgtctttaggttcatgatggccagctaaaatgacgtgagcacctgctttggcgaatagagtggcagcactcaggccgattcccgtgcgtgcacctgtaacaataacgactttatctgtaaaattgaacatgactttctctccttaattaatcttcttcaaactgcattttaatatttcttgatgaacggaattgtttcaaatcgccagcattaatgtgaccaattttttgaaggttactaatcacttcgccagtttgctcataaaaaatcactaagctgtgtcgcggtgtccagtaggcgatatcaccaactgcatagccagtagtgtgtgcctcgttagcagggagtgcctgctgaaaacgatacgtcaattcacggttataaaggttgagcatcggcagtgttagtggtagttgtgaaagtaacgctgcggtggtggcattttcttccaaatttgctgtgaagtggcggtcgttggctgttatcttcattttcttcattatctagtacctcctaagccaatgcgttatattcgtcattactaacgggtgatagccattctggtgtgcctgcagtgatggcaatgtgactgaaccaactatctttagtagcaccgtgccagtgtttgataccgtcatgggtgatcaccacatcaccaggatgtaatcgctgtgccggttgcccggcttcttggtaccagccttcgccaccagtgactaataagatttgatagccattgtgatggatatgccagttgttacgggctccgggttcaaagctgacgttgctgacagttacgttgacttgctcgtctttcactagagcgttgtggtaacttttaccggtaaagtattgttgaaaagcaacgtttaaatctcccattgcaaaaatgccgtgttggacgctattttcattattgttcattgttaaaaacacctttcatttaaaattaattgtgggctaaaatttgaagctcggcttttgttagtacgtttcccactagttgttcacggaagtcgttgtaatagaagcggttattcaacggcaagttgtgcttgagtgcaaatacggatagtgtatatcgatgaggctgatcaggtggattcggtccggcatagtgatcggcgaaatacgaatcgtttaactgataaaagcgtgacatccatgagttttgaccttgggggccctcaaaattacgactgaaatcggctgggatttctgccatgacaggaatattggtcgcgagccagtgaatgaacggaaaacccgttcgtgggacggcgtcgtaatcaatgagcgaaatagcaaacgcagtcgttattgcaggaattgatttgatttcaattggaaacgatagaatcggttggcctgagtgtttgacgttcgcgttactggtatagattagtggtaaaaagccatcgtctaaatcaactttaatttgcattaaaccgacctcctagtaaaaaccaggtttgttccaagcagtattgggttcagcgacgccaatgctacttcgctgatataattggggattgtgaataatttcagtaatcaggtcagcaacggcttggcgtgtcacctgcgtatctttgaatggcatcccctgaggaatgaccttgtagtccgtatgctggtcattattatatagccaggccattcttaaaaatgtatagttcagtccactattatcaatcacggcagcagctcgcttgatttcagtataatcacccatcatttgggcattccaaataccaaatttaccagcgacttcatcgtaaatgcctaaaccacctgcgacaattaggcgctcgacaccattttgcttcatcgcatcgacaacattttgattggcggtggtgaaatgccccgttgccaagtaaacgatatcttgacccgcgattgccgccgtaagatcagcggaattattccaattgccgttcgtgagggtaacctgcgattgggcggcgtactgatgaagccgtcgagtagcttgacgagcaaatagtgtgagttcaacatcgttttttgcaagtaggcgtggaattaaatattttgaaatgttactggtagcacctaataaaataacttttttcattgtaagaacctctcttttaaaaaataagacttaataaagttgctacgcccaaactaagtacgaggaagatgaggcaaaattgccaattccaacgtaccgagacagttgctgagctgacatgtaacagggtcgcgacaatcatgacgatacctgcaaacggtgataacatgtatgcaacgacgcttccgatattcagactcaatgcgattaatagtggtgaaagggcaatgtgcatggtcataataatcttgccaattagtgctactgatgctagtgggtgaatgccaattagggaaaccaatacgacaataatgggaattaaaacgatcaataaccagccaaggtgagcaaagcttggtgctaacgcgtgggttagttcgctactgatagtggaatgttgaaaaccgtacgtgaacgtaccgattccaacaaagaacggcgcaagcgctgcaccgcttgcaattccgtgttgccaataatcaaggctagctttttttagtgcaaatttgaaggctgtttggcccgtagtcggcttgagccctaatgccgtgacccaaatcaggacaattagtaaaccggaaagtgtaacagcgttcattgaacttacgactttgctttccattaaaacaaagctgagtattagtagggcaataacggccgccactaaactgacaagtgatgcgtgttcggtaaaacgagtctgctgcttagtattggttgtcacgggctgaatccgcatatacggttggttatattccatcaaatacgctagcaataatcctaacaggcctaaaatcaggcatggtatgaataattgggtccacccgactttagtaacggtactgattagaaagattgttgctgctccaggtgcccataatgtgccgagcgtaaatccacgggttacggctgttgccgaaaaacgggtggcgtctttgacttggcgcttgatactgtcgcctagaattgataggacaatggcaacggtccccatggagagaatacttgatagtaggtgcgtgacaatcatgacaaaggtgaaggtttgtttggggccacgaatgtgcttttgcatgaatgcttcgacagtagcttggtagttgccaatggtgacagggattaagaaaagttgcataacaactagtaacaccacgatatcgaccattgaagtgattgccatggctagaccgttgattgataaacccgtagtacttagcagtccaacccagcaatgaaaaagatcaatgtcgcgacttgaaaagagcggcttaagctttgaattccgagaattgagaccccgattgcaagcacggcatttaatagcgtcaagttgacggggacaattaagcttagtaactgaatgattattaggcttaaaactagactgtgataaatcgtcgctttattgatagaccgttccattcatgaatcgctgctttctaatattgatcgtggattgtcgtcatcgattagccttgctttgtcgggtaaatggtaaattcattgacgttgacgtcatctggttgtgcaactgcgaagtcaacgacacgggccactgcatctggggtgataccgacggatgcatataatttattcataccttgcttagcattggtatcggtaatggtgtgcaataattcagtgttgatagctgccggatagaggctggtggtccgaatattggtgtgttcttgagcactttccatgcggattacttccattaaattgcgtactgcaaatttagttgcaccatagatgccggaaccagcgaaactcttaagcccagctactgaagatgtcgtaatgatttgaccatacttttgattggtgaaatcaggcattactgcggcgacaccgttcaaaacaccttttaagttcacatcgatcatggcattccattcatcagtttttagtgcactgattggtgaagtcggcatgataccggcattattgaaaatgacatcaataccgccaaattctcgctttgctaaagcaactaacgctgttaagtcttcaggcttagtcacgtccgttacgcggtaagtggcttgcccaccttgttgctggattttattggctaatttctgtaggcgttgttcacgccgtgcacctaaaacaactttggcaccatggctggctaacaatttggcacttgcttcgccaatacccgatgaggctcctgtaataacgataactttgttttttactgacatatttgtttcctcctgattaatttttttgtttatttaaaatgtgatggtaatttaagacgtccattgtggaaaaatcatgaccggaaagctggattttttcaccatagggtgatagtgaaatttgattgtgcccaataattttccaagtaccggaataaatattagtgacgtgatgttggttctccttccacttgtgatccgcagtgaaagtgatttgttggtgaatatctttgttgtggtgattgatccaaacaccaacgacatccgcttcggtcagatgcgagttgtccgaatgggtaacacttgtctgttgcttggtggcttggttagacttgtcggtggttggtgagtgttgctgaactgcatagacgatgacgacaagtgcagcgacggtaacaataatttgaaaaatagtttgcataaactttttgttcaattaatcatctcgtttctgatgtgctgtgcctcaactacaatgactagtatagccagcaacgtgcctcctgagaagaatccgttagttagcttagtattaacttttagtttatactagaaggctaggaggtgaccgttgtggattttaatcaattacagacgtttttacgagttagtgagtatggtagttttacgaaggcgggggaacagagttttatatcgggtactgcggtgatgaaacagatcaaccggctggaagcggagcttaacctaaaactattcgtccgaactgcgaccggggtccaactcacaccacagggtaagaagttccaaccgtatgtgcaacagttgctcgatttactaaacacggccattgaagagacgcgacgggtccgttcagacgataagcaactgattttgttgggaacttccttactacatcctgctgatgccttcatgtcattatggaaagaactggcaccaaagatgcctaaatttcagattagattagttcaattgcaggaagacttgaattcgagaaatcgtgagtatgcgatgcttggtcggagtagtgatttaatcgttgggacgttcgatagcacaactttgaagcagtcctttagtgcgatacagttgggagcgtatcactttggaattgctgtccgtagtgataatccattagcccagttggatgaaatcatgtacagtgaccttgcgcatcgtaaagttctgatggtgtcaacgggaattagtgagaaaaatgatctggttcggagtgaaatgttggcggcagaacctagtattcagccaattgatactagcgggcgttatgacatcaatacgtttaatgagaccgttgaggagaatatcgcaatgatttcgcttacgccgtggaaaagaattcatccgaatttagttacagtaccgctgaaaacgtccgtaacagtaccgtatggtctattaagcaccaagttcccgggtaagaagacggcagattttctacatgaatttacgaagttggtcccgactgaaacgcagagccactcataaaatgacattaaaaaggcaactgttcgtggtcacggtacgtgctggtggactttttggggtttgagtctaatttgaaacttgcaatcatttgttaacgaatactggcattcaacctgagttaaatgtggtctgaaaagagccccatggtattgttgaagtacgtgagtattaagtttgcattgacatattgtaaaatgattttctagaaagttgtagaagtttatatctaaatcttttgagctactctctagatgcatgatttgcaattgcaatcagaaatgatataaagtttttaaactttaggcttgactataaacgaatagacgtttattatacaagacatgcgatacaaagataacaacaaaaaagaagcgatttatcaagcaacaattctgcttttaaatagagacggcttttcatcaacctcaatgtcaaaaattgctaagcatgctggtgtttcagcttcaacaatttatatctattttgagaataaagatgatatgctgaagaagttatacttggatactaaacagaaaatgagtacccaaatgttttctgacacgacagatagtgatgcaaaaactggtcttgccaaggttattcgtaactatattgattatattgtgaataataaagatgcttttctcttcttgcagcaatttacgaattcaccttatatgagtgaatttgatgatcaggaagcaagcaactactttacgcccatgtatcaaatagttaaaagcggccgacaggagggaacatttaaagatgtggacaatgatatattatttgcctatattgagccgccaattaccgaattagccaagcgttattttagaggagaatcaagttttaccgaggaaagaattgaagccttgattaggttagcctggagtgctattaaaaaatagcactttcatttcgctcctatagtgaacgtctattcgtttattatagagctaaatttcacaatcttttattcgcatactactaaaaatgactggagatattatgatgcaaaagaaagtgacttttcagaataacgaacacgatatggctggtatcttattcttcccagatgactttgatgaaactaaacaatatgccgccttcccagttgcatcgccagctggagctgtgaaggaacaaattgcaactaactacggttcaagattagctaagtacggctttattgccttagcctttgatacttcacatcaaggtgaaagtggcggcaatcctcgtcaattagaagcaccttatgaacgtgtagaagatattaagtgcgctatcgattatttaacaaccttgccttacgttgataatgagcggattggtcagtttggcgtatgcgctggtgccggttattcgatgcacacagccatgacggatcgtcgcattaaggccgttgccgttgcaagtatgagtgatccagcatcatggattcgtgacggatttgatggtaaaagtcccgttgatgcacaattggcactactagaagaggcttcaaaccaacggactcgtgaagctaatggcgctgacccaatttatggcacctttgttccagaagaagtcactgagggtatgcctaatactttggaagaggctcacgaatattaccggacggcccgtggtcaacacccacgttcaactaaccaagtatcaatgatgtcaattgacaaaatgacggatttctcaaccttcctatttgctgatcgttatttgacgcaaccgattttgatgatcgctggtactaatgccgacacattacgtttctctgaagacttacttaaaaaagcggcttcaaagaataaggaactatttaccattgaaggtgccactcacgttgatttgtatgacaaaccagaatacgttgaccaagcagttgcaaaggctgcggccttctttaaagaaaacctttaataaaaagtaaccaactcaaatgacgaagaaaggattggttgatattgactgaatcaaatggaaaagtcgctttgattacgggcgccgaccgtggaattggatttgaaactgccaaagaattaggtgcccagggctacacggtgttaatcggtagtcgcaacttagagcgtggacaaaacgcagtggataaactaaaagcaatggatattactgctgatacccttcaaatcgatgttactcagcgctatacgattcaaaacgcagctggtcaaattaataagatgtaccataaattggatgtattaattaacaatgctggcattgccatggcggacgacgtactaccaagtaccgtgagtgaagaggttctgcgtaaaacgtttgataccaacttttttgggagtttcgtagttactcaaattatgctgccattgatcaggaagtctgatgctggtcgaattgtcagcctctcctcttcggttggttccttagaatggcaaagtcatcctattgaaggtgcaccaattaacccggcttacgctgcatctaagaacggcgtcaatgcgttgacggtgatgtttgctcgcgaattagtcgatactgatattaaggtaaacgtggctgatcctgggtggactgccacggacttaaacggatttaatgccccacgtagtgtcgcggaaggcgcaaaaattgtgattaaactggcaactttacctgcagatggtccttctggtctactgattagtgaatctgggaaagtcgcttggtaagtcgtaatacagtgaggtgatcaaagtgaacgcgcaggtcgtttatttttcaaatagtggtaataatgaacgcttagctaaaaaaatttctgcttattatacaatcactgcaacaccaatcgtaccagttaacgcctatccgactagttatgctgctttaactacgcaggcaaagcgtgaacggtttcggcatgttgaggttccaattaggccgcttgaacttaaaatggataccagtatgttaattttagtatcgccaatctggtatgcagatttacctcgcccggtagttacttttttgaagcaacttcaacgatcatatcaacgagttgtttttatcagtgataaatttatggtggggttcggtacttgtggacgaactttgcgcaaatatttaccagctacaacgataattgaaaaggtagcagcaagtcgtggcaacttctctccgattatggcaacccttggaaaatagtttgagaggctgtgacataagtctctagaaacaaaacaggtctggaaaaatccgaaaatttttccagacctgtttttgatataatagaaaatatatactcttttcaacgtaatggtcgtttaaatcgtgcacagaacctagaaacgttgctttgacattacgactaccaccgatgttagatccattcatggtctgaatacgataagcttcgccactatcagaatctagcaaaagcgtgcgtggttgcaacatgcctacagcagacgcattcgtccccgtgttaatgaacgtcaattccaactgcgccacttgattcacggtttcagtcaattgtgctgaaatcgggataactggtagttcgttacctgttacatcacgtaaataaaacactgtcacacctcctaaacgtaatagcgtgtatcaaactccaaatcataattcgttgcacccgccaccagtaattcattaatccctttgacgtaatctaaataggcatgattccccttgctgtagacattcacgccatccacaactggaaccatgccatataaaattagagtttgggatttattcaatgcttggtttaactgaaacacctgccccgtagttttgttagtaattgataactgactagccacatctccatggaaggttaatgtggccgtcttgccatcagccagcagcggaattgagccaccaacaaacaccttgacgtcgctttgattggtgaaacgatacggtggcaaacatgcaaacggaatatcaaatcctaatggaatgttattcttcatgttagcagtagtgttaatcgtctcaccaaatccaccggtaacaactaggttaactgtgatatcttccgtcataataggtgacgcttcataagggtctacattaaacccatcatccgcatggactggccagcgaatcgatggaatgacgctactaacaacatagaaatcttcgtaaccacgaaataaatcaaacagcttcaaccgcattagttcttggtcaactgagtcaattgttttgacatcaaacactagtggtatcttgcgttcactcgtgtgtgtttcagatgaagttacattgtacttaccaactggcgtatacgttcgagtgaacgtcggtgcaggtggtgaaaacttttctacttgaatacccaaatcagatagccagtaattactgccatcctgttgaatcacttgaatatctaactccatctatttgcctcctctcgctcgatcaatgacaacatcttggcctagagccagcttaattaacggatactgggcattaaaaaggacgccattatctagtttggcagtgatgttaactgtcttgctagtaattgcgtccactaatgacttgaccacacctaatacctcaccagttccgttcgccactgtaccactgactgcgacgggcccaccgttcttaggaacatctagggggatggtactctttaatccagcggcctgctccgcacttgtagcaacgaaggcctgctgaccaaatgacatcttgacagcttgattcgttaaatacttgctgtaattcgactgatcatccggaatatgaatctcacgttggttatgctcggaaacccaagcaagttgtttttcgtaggactcaccgcccttgtcaaaacgacgatgaccgcttggaccggaagcttgtccacgccactcgccatatttgccgttataacctacaccaatatctgagctccaattgctattgttaaaaaacgctaataattgatcccatgcagataagatgttgtggtgcccgggtagtgcgtaggtatcaaaagtagatcgtttgtattgtagtagccccatagctgggcctgtaccgtcaccgtcatcaattcctctaatgtgagcattgccgcctgattcgttcttaatcaagtattgtaattgctttaatttttcaccgtctatgctggtcttcatagcaagcgctgcacgtttaatcatgcttggattgtacgttgcaccgccgacacccaagtcgcctagactgtcctctagtttctttagccaattggtttgcttcttttcccagtccttagtatctgggccaaactgattctgtgagccacccggaaataggttcatatcaaaacttgaatctattaatttttcccagttcttaatcgggtgctccatgaacttcatagcatcaccaaataggttcttaatccaatcaacgatattaccacccgaaccagtcgcaaacatcggtaaccccatcattttaaggaatggtgccgctttttcagtatcctcacctgaaaagacttgagcaccgacaggcaagtgggtcacagttggaacagccggtgacagtcctaatgatccattaccgtaatcaatcaattctggcttataaccatcaccgactattgcagtttcaggacttgtgattttgccattagtaccggttttatgtggtatccctgtcgttatacttaacttgttttcagttgctgtgtaagaactcttaccaccaacagctttagacaatgcattaacgctagctccaccttgatcgaggttatgggccacgccctttccaactccgccggcagacttcagggggtcggccgctttctcgactagaccttgattgaatgattccattgtatcgttaccagcaccaacagctttttgccccaaagtcataacatctttgatggtttgagcagtccctgtaactgaattaatgggcacctttttctcaccgttgataccatcgttataactatccatggtcttacggccgctttcaccaatatcaacattagtcttccccttaaccatcgctgctaatactttcaagtagttttcagttgaaattttcttatcagcataagccttgttgagggtatccatggtccaactaccttcgccactaatattaatcttggcgccggtcttcactgcggactttagcttgttcaatgcagatttagctccaggaattcccaaatcaataccagttgctaaagtgtcaatatctttttgcccaatctttttcaaatcgtgatcaaaaatattggaaattgctttaccataacgtgtctttaaaccactcttggtaataattccaagatccaagcctaatttgagtgattgaatatcgctcttacccagcttagataaatcctgcttaaaaatagcagcatattgtttgccataccggcttttcaactgagaatcagtaatatcaccactcttgagcccttcttttaaggttgctatatcagtttttccaagttttgataggtctttaggaaatagaccggtaatattgtctccgaactgctgttttaaatcagaaatagttacgactccatcggctaacccttgtttaagggtatcaatttcttttccgctcagcttggacaagtctttcgggaaaaggccagtaattgtatttccaaaaacgggagctaaatctttcaaagataagattcccgttgaaagacctgatcgaagttcttcctgttcagaatcggttaaatcactgatattctttttgccgtcatccttgaagccggttagaattgaattgaaatatacttgtgcttcttcataaccctgtttgctaccagatttgacatcagtccagaactgttgtgcagttttatatccgtatttaccaagagaaatgtttgcagcgctatcagaaagatcaagtccccattgcttagcaacattggctgggcttcccaaagtgcctttattcaaagacttaacataattatcatgcgttttttcagcacttgcggccaatttagcacctgcttttgttgtctctgccagcatattatcggcatctacctttgcttgtgcagcagcagtagagtcagacatccccattgcctcatatgctttttcctgagacttctggaacttagctatattcttttcaatggtcccatgtgcgttgacttgatcatcaatgtacttctgattgtctttcttatggtccgcaatccatttggctgctgattcttcactgttactgacatcgtcccaataaagcttttccttttttccattttcatcggtaatcgttttcgtgtattcatcatcaagcgtttgcttagtacgcaagctttcacgaccattgttgttatacgcatcgccggccgctttttcagttttgatgtattccagtgaggcctgagtttgttgcttgttacgcttagcgtctagcatggcaagtgcttggtcgtattggtccttgctaatttggtcattttttcttagtgatttcagctcagacagactcttcttataactatcacttgccttgccataagtcttggaatatgccgaatctgctgacttgacgtccgccttatacatgccatccgtgatagtgccatgttgttgaacgtaggctttatataatgcttgctggtccttataagccataccaaacgcggagacttgcgagtcaatgtaagcttcagcctcatttagcttggccttctgagtagcagacaacttagagaagtcaccgtcaactgactttaaaatgctctccatcgtttttttagctttttcaagcttactagtttgcccatcagcccgcttatcaacgcccttttcaacttgagttacccagctattgccagcacttccaaagcttccggataagtcggatagtgcagccatcccggcctttttagtcttggaaaactgttgttcaaccaaatcagccatcttactgtatttagtaaccacatcgctagataattgtttggactgcttacctaccgcggtgtccaatagtgccatatcattcttggctttttgatgtagttcgttgaatgagccaattgctttttgcgagttttgactaatattagcaccatattcgtccatcgaagcacgttggcgcttcaactggtcactatgctccttgccggctttaatcgcaaagtaagttgctgttcccacagccgctacacctaacacgaccggggcggcagctgcagccaatgcacctaatccggatactgtacctagtgctgaaccacctaatcctagcaaagaagctgaacccgcttcagcaccaccactaagaccagcaatgacagtactggccgcaccgccatctttaactaaagtgccaaataacggtgatagcttggcagcaccaaccaataatttcatagatccactagttagtagccctacaccagaggtcaattttccaaacatactaatcaatggtccaccagccgcaacagctaagcctgtattaagaattagtttctgcgttgccggatctaagtcgctaaaacggtctagcatattctttaactcacgaataatgggcgtgagggttggtaggaacttctgcccaaattcaatctctaaagcgtttaaactagatttaaattgggccatggtgaactgactcgtgttacgcatggttttgttgtatttatcaacggttccattgctgtgttcgatctcattagataacgatttgtaccgatcaagattagcgtccatcaaggtcataccgaccttcatgttttcctgaccaacaacgttgtacataaatgactggcgctgcttatcattcattttctggtaagcaccctgcatttgtccaagaatatcaaagacgtctttcattttgcctttgctatcgaatacttgaatattgtatttctttaaatccttagctgcttgacctgtccctgttccaactcgtgtcatcaatgatgacagccccgtaccaacagagctagcgtcaataccagcagactttaagcgccctgcaattgccataaattcatatgttttaacgcccatggcgtgcattgcagcaccagcattaccactaatttctttcaaatcgtctaatgacatggctgacttatgggtggcttcagtcatctgattcatcaagctattaccattcttgattacagtactgtttgaacccaagttctgaccaaattgttcaagcatagaagcggtcagtttaatagactccccagactgatcggaattagcggtcatagtctttaacaactctggcatcattcccatggcttgtttgacattgtaaccattagaaaccaattcaaacataccatcattgatttctttggtaccaacaccaaactctttggaccattttaatgtgtctgaagatagattcttcataattgagcttgtttggctagcagagtatccttgtgcaacaacttccttacggatatcagctaattgatattgataatcggaagcggctttagttgctacacccagtgctgtgacaataggtaccgtaaaaccaatagtggccttacttccaagagagctaatcttttcaccagcattttgtatcttagtacccattatcatggctttgtcggctgcagcagccatttcaggtgttaatgcaccaacacccttttgcaacttgcttgctgacaaaaccagagcttgctgttcacgttcaagggcagcatatttacttttagctgctactacttgagcagaattatcaccttctgctcgtgacagacgaccaatttcaccagctgttgctgtcatctcttgtcggttagcttgcaactgtgctttataagagttcaacttagagacttgagaagacatgtgcagccctgcttgttcttgagcggctgatagcttactataactggctgcagttgtctctaacccttgattcaacacttttaaattggcagctgctttcgggctaacatccacgtctttaaatgttcgcttaagaacttcggcttgtgcaagtgcctctttagcgattaagtccacgttaatcttgacgctaccagcaatatcagccatctacacacatcctttctatattttcccttgctcccgtaactctttcatccgtaacgccttgtgtggcatatctaaattagctagctcgatagatagttcatctggtgtcagcttgccgtcgccatcggtgtgagcttgctttaatccataaatcagcttcatttgtttcagataagtttgcgtatcagcatccatatcatcactaaccttggccagtcgaaatctgacaacttttttaaattgcgtatcttcattcagaccatctaacattgttgtaaatcgttcccaactgagactatctcggtctaaatcgataccatattgttgttggaacccagctttgattaacgattcgtcttcatcaaaatcaaaagaccgcttaccagatttgagcaccttggctcgaacccgatcgcggtcattattgatttttttattaaatatttcagacagtaactgacccttatcctcaaaacgtagcttgctcgtatcgtccaataccagtgcttttaagctgacttctacacgctccggtatagtgaggccttcatcccggatcgctttaaaatagagcaacaccatgcgaaatgaaaggtctaaacgataccgatgtttccgaaacacgatgctgttagtgtttatatcggtaaaactcattgttcattcttccgcaattctgtaatggactgtaagtacttgtcgcgataatcggaaatatctgtatgttgttctacgttaatcatgatttgagcgacgaccttagcaaataccaccatggaatcattgcaagtatggtatagttccttgccagcatttttgccaaacatgccatcaagtaattgataaaagcgttccttagcttcaagcttatatttgttctgaatatcatcgtacattcgtaaatagcgtcgttgtaggatttgtttcttatgatctaacgccgtcattggttcattaatcatatctttttccaattgagcttctttatcagttaactcaactgatcgatgatgtaactcctgctgtaatttcacctcagccattttaatatcattatattgatctgtaaaaacagcaaatgatttatccgcaaagctcaccgtgtaactcttatcaccaatttcaaaagtcatactgtcactaggaacctctaatttaattacatcactcatgctggtacctcctaatatttttagtgctatgtatggcggattactccgccacttgcctacatacttgttaccactgcaccatcagttgtaggcattgtattgatacttgatggtgctactattttgacgtgccatctggtaaattagctttgacatgcaagataagcgcattttgacatggtgtatctgctaaagcagctttcatatcagcagcttgtgtttttgcaattaaacctggagcagcgttatacgtcatagtagttttgaaactaccattatcatcagcggcaccaccaccatcatcaatatcggtaaaggttcccatccctgtttcaatcatgttaggggtaagtgatccatcatcttcctgcaaccattgtactttccggaacattcgttcacgttgtgacccagttttttgcttcatgccagcaatgtcatcttgcgccgggttaccaatagaacggtcaccagaaatatcatacgatgacgttaccccagtcactgtctgccgttcctgaccgccaccattataataagcggcagatttcttcttatcagtatatttaggtgtgaaagttgtaataccatcacctaagtacatccaagtaatcgtcttgtctgtcccagtcttacctacccaatattcatctaaatagttttcctgaattgatccttgataatttttatcggtaggatcatttgttggcgttgtagtatcagccattgtgcattcctcctaaattaaataattacttgtacactaaaagcgccttgatagacgccatacttttgagcatcttgaccatcgtcatcctgaacagtggctagaaactccggtgaggttgtcatcttagcgcttatgaatttgaaacttccattctcacttttgattgatatcggcgttgcattctccatgatgtccataatggcactgagagtgttaatacaaacaattccgtgtggatgtttagcagtgattgcaaatgcaaaactacggcggcggcgaccgtcataatatcgcgttgccggtccagcgggttgcaatgtataactcagtgacattccaggagcatagtcattgccaagtgttaacgtatcaaacagcttaacgttagcactaatataattagcaacccgaacatccagatcaaggtcaacttgactcactacgtcgcccccaatccgtgtgccacgagcgctgcccaattgtgaccattaaccaaaaaggctttatcaacccaacccttttgcgctaacgcatgcttagtgtggttataattcaaaggccgattcgtcactactttgtgatagcctctccgctgacccattgtatccggtgccttcaccattactttaccaccgtacatataggccgcatacggctctgtccaaacaatagtaacgccagtaccggtttgaattctcgatacatggccagctaaatcaccatttagaaatggcacatattggtcagaatcatgcacaatcacatctgctagtcggtttgtcagcacattaagattattcaaacgtgtaactaatggtgacaagtctactttgttagtcattgcagcaccccttcccaatgatgaacatgcgtaccgaaatcataaataggatcaaggctcttcacgattagcgattggtgagtactttttacttcaactttgtcgttaatcttgggcaacctatctagtggcgtcgagttagttgaatccacaattagtgtataggccccggtgacaacctgtgcactagcattaccactaacggattgaaccgacactgaggttgcaggttcgactcgtacatgtctaatcgtgtagtcatcagatccattactatctgagcttgtaatccatgaatcctgtttggctttattagcgtcgtagggtgtcactttgatggcatcatctaacaactcgatgggaattggatcaataatatcatccatttaatgcaccccacgatacaataggccagttggtcgtaagtagttgattgccgcattggagcgttgtgccgtaccacgtggcagcgttgtgggcgctgacttatcataactaaatttgcctatcgttacatgactaatccctttagccgattgtttagcgttagctagctcttcaaccccaccagaatcaataaaccattcaatctgagcgcagacagccttcttcacgttaattcggtcagcctcaagtggcaaatcatcaagattatgcgaatcgaaataataatttgcgtattgattgaccatctcttcggctcgcatttccaaacgtccaaaatttataattactggtacttgctcgccaaaataagtgttagcgtaaaaatcttgatctactatcggcatctaatcacctctaaccagcagttacattggcaccatcagtggttgctgcagctttaacattttgtggatcagcgggcttggcagcaagaaccgtaaatcccagaacatctaccttgtcactcacttggctaccgtccacataggcaacctgatagtcaccagtagcgacaactgtgccagctgctaagccagtaattgccacactggttgcatcaccagtcgcaattgccgtttcgttgcccttttgataagcattcaacactttagccattctacattcctcctaattttaattgcctactttgctgtgatcttcgcaccgtcattcgtaggcattactttaacattagacggtggcattattttgacggcgtatcagatgccacagctttacccttattggattttttaaccgtagcatccttagtgctggttacgttttggttaataacagtaccgccttcgacatcaaatggattaatgactaacaacttagtgtcatcatagattgcaacaccataatgttcatcggcattaaacttagtgatcttatgatccatatcgcgacccttttcagagagaacattccgcttcatgtaggtacgcattgcacccggcttaactgccacagcggagccttctttgatcttacgtgaccgcacaatttgccatccgagtaactcaccaaatgtgccattaatcaagatgttgtcgcctaaatcagttgctcgcgtccagttctcagcagcagccttacgtagtttattgacatctttagggttcataaacaagacgccggtggtcggtgaatcatcttctaccgcgtattcactcgtatcatcattaaatgcagcttcaattgcatcaaccatatccaatgacgtaacatcaacgccagtacttagcgtaagccgtgctttcattgcagtagccaagatgtcattgtcaatcttagatgcgattgccatcgtaatttgtcgctggccttcgcctactggatctccgtatccggatagagcggcttcgtcagtaatcttgacacctttacctgctttcttaatcgtgaacatgtcggtgtctgttgctaggctggcataatcaatagcgccaccttcatcgacatccgtcgcatctccgatatacttgtatcgaggtacggttacatcagtgcctggtcgaccttcaagtgtagtgtcaacaggtgcaatagcactaaaccggattgccttaggcaatttagcgctaatcatcgcagtcataacttgtggatcaatcaggttatctaatacagttgtttcatctgccatgtgttatttcctcctaattatttgttagttttgtaacagcttgcttgtaaacatcagggtgctctagtttaagttttgcagcttcaccatagctaatctttgacaaatctggcaccgcaacgttaccttgaccaccgctaaggttctgaccagcaacggctgttccttgtgcgacttctgcacctttaaacgatgggtttcgtgccaaaacacctgttaatgcctcatcgattgttttaacgccgttagctttattcaccaaatcggccttagcgagtgccaatgcgtcacccaaatggccagcatcaacaccctgcttaagtgcagccacttgtgcttctgcattttcagcacgactggtttcctttgctaatttactggttgccttgtctagctcaccagatttcgcttctaactcactctgattagccgccacatccttattatgttgttcaacaacccctttcaagtcatcttcattatcgaatccaagcgatttcaataattcggtacgtgcgtctgcagccacctgctctgtatcaaccgaagaaggagttgccactgaatcggttgctggggttgtcggaggcgtagactctgttgacgttgcattatcctctgccatctttattgctcctctctaaatttaggtataaaaaataagccttttaacgccatgctaagggcactactgtttttctcgattgtattgacgtactagcccatgcttgttaacaaactgacgagtaactgactgacgacgtctcactaattcttgtgcagccgtaatatcactttgatcaccaagctttttagctgctatcaatctacgcttagcttttcgtacctcacgttcaagtcgtcgctgagtttgttctaattgatacctagcagcattgtcatcatctgactgctgtggcactggcattgaaccgtagccttcgatatatggaaccgtataatgtcgacaattaatgcccccaatgccagtaatcgtaccgtatcccgttgttgattcaaaatctggatacttgtccgtatcaccatccaatgagtagacatggtcttgatactgcaagtggcttggccgacaaccaatatgtgaactaactttaactaacgaaccatactggcgatacctaagtaactctgtatcattcgtagcactattaatacttgagttaaccactgtccgcacatagacatctggtgaccattttcgaccagccttatcaacgagtgcgggtacaccttgttctgcccattgctcactagctttagctattgctttgatggcagttgtaccactatcaattgaccgctttgcatcaccaacaattcccctaaacatctgatacgcattagcgctcatattacgtctagcaaggttcagataattatccgtctctgttaactggtcatcaacaacttgcttaaactgttgcgaatccttgatcgaatccacttgctttccagtaacctttttaagccacttttcagcttgtttgacattatcttgactaattgtactaagtcttgtgtgcaattgcttagacgtatgctgtgtaggcgagacagttattttagcagcatattgccttacatcatctgcatgattaagtaattcgtttatccattcattgtcggtatcatcatgtttagatgcttcatttcctatcaggttgacaatgtaagaccaaatcaaatcttcaacactagcatagttgttagcatcttcatccgaatagtctgataaatcccatggtttaagcatcaccctcaccatctttaccattaccaccgacaacatcttcaattgcgccttcagcattcgctgtttctgcattgatttggtcaagaacctgttgagcttcaacatcagtaattccattagcccgcttgattgcttctagctgtgtcatgacggggtgattgccattagctttcatgtaataatccagattatcattccggtctttggcaatcgaatcatcaaagttaacagaaatatcaatatctgtttgacctgaatattgaacattggaatcatttttagccagctccacaataatctggcaaatatgttcaattgcttctccaatcaacgtttcatgactgtttttggattgatacgtatcactattctcactaattaccgctgtcgctgtgataacaccctgtttgctgtcaaacgtaaacatatctgcgctgaaaccaatttgtgaggagtagaaatgcaacagatcattgattccagatacgattgcttcatttcgcagtcctaatgtaatatcagtcggtttcactgactcaccatcaccgccactcattgtcgtgttgtatgccatatagacatcttcattccaatcaacataataccgtgttttaccggtttgtggatcaacttcacgtttcaattgatttgctggtgcggcaatacgccgttttcctttgacaaattcttggaataacaagtcataggcttcatctaactggcgcaatgtgtctatggcgttagcgtagataggaatacccaatggactgtcaatgtgcaagttattagctaaattaggctttaaataaataaacgtcggccgtgaataaagctttttggaatacctagttggctgcggtgacatgtttttgaacgcatctggcaagttactccaatcatcaatcttcacacccaaatcatcattgctattggtcgtactcttgtagatctcgttagtcacgacatagtctgtatcggtttcttcatgccattccaataacgtatagtaatgactgtcactcatgaacttggaggcaatgacggcttcacttacaccattagcatctgacgtgattggatagaatgcatcagcagtagcaaatcgaatcttaactttaccacgatcagtgtacaatcggataacaatgccaccagttgcgaacatatattctaagtaacgttcaaaattgttatagaaatgattgtccttcaaggtttgctgtacgaactgattctcagccgtttgataatcatccggcgatgagggatcatcaggattcttcgcgttctttgggctaacagtaataacagccttttgattgaataccaaacttgccatcttcttggcggcaacttgtcccatgtttaatgacattttctgacgatctaaataagaatcgtcgggtaactttttgtgtattttcaaccattccggtgttgactgataaatgctaaaccacttagcaatcaatccatactggtcatcatccgccattaccttcttatggtcagttacgctttgcaactcagtagctaatcccattttgactaacaccccctttatccaatcatgtattctgttaaacaaggctagtaacctcccttgtatttcttcgtaaagtaattagcagcgtaccggcactcgtccattgcatggttattagcatcgaccggcttaccggttgtttcatcacgtacatacataccaagttctttaacaaagtgataattatcatagctctgatttgctagtccactatccggcgtatcaactaagacaaactgaccatctgcaatcaatgattgttgccgctgaatgccgacttcaattcctttagagttaccaacgtgatcatgcccgttgttatccgccttaccagcttcaacgccaaccttaattagctcttgtcgtaatgccaatgaagcgggatccactaacaccatcgagtagtgcagttggtatgtgttaacacaccacaaaataaatcttcttaattctgtggcatatgtgctcattgcctttgtttgtccggtctccgtaccactgtgataataattggcaacacggtttagaacaaacttaaaacgcccatcaggttgccggacgcgggtaacaatattgcaactcattgttgtggcatcatcttgaccagcatcaccagtaaaaaacatttcaactggttgtccaatcaaggtatgattagtcatactgtcttggtcaaactggtcatagataatcccctgtggcatgactcttaatcctaaccaatcacgcttgtacagatatggatttttcttaagctgcgtctccatctcagccagacgcttggttgtcatcactggattatcagacatacgccaatgtaaccagtgcgcatcgcgctcatcaaaaaatttaataattgggtcttgtggtgccggtgggttaagatcagcaagatgatagcgatacttagctgcggccgtccgccgaaaggtttcatcaaggaattcatggtttaacaagttgatttcagaatacgcaactgagcctaatgacataccacggatagcattggcactgtttgacttggccccgcctttgaagtaaatcttcttttttccactcggtaggtctaaagctaaatgatcgccaccacgatcacgtctcaaatgactagcaccatcaaatatataggctagtcccatgccatcaccttcgataaacaggttataagcaagttcctggttataggcgctgactaaatggttctcatccgttgttgccaaataaaacagcgctaaccgggcatcatctgccgccgtcttgccagcacgaattgaaccttcattcacatcaaacagatggtcgaatggagaaaaaataaacgttgcctgtttcttaccatattgaatactacttagtggtgtttgcatcgtcttcttcctccttaggtactaactgctgtgctcctttagctaaagctttaagcaatggatttacatgaccaacgccttcaagttcattagccttatgctcaacaatgcgagcatccgcgttagccttcctgatttgtgcctcccgaagttcatcattaccatccgccgagccaaatccagccatggttagaatcgttgtatttgcttgtaagcgtaccatctcagacttggcatttaaggatagctggtgtaactgtttgactgcatccggtacataaccatccaatgcgatatggcggtattcttgctgagctttgataaaggtttggttcttcttccaattggcaagtgtctgtcgtgaacggtttaccgttttggcgatttcttcatcagtcagttcatcttcaaacagcatgataacagcctttttccgccgttcatcaaggctttgaaaagcaccattttgtaaacttttgtatactgtcattacataccaccacacctccgttaattggaattaattacattaatacaacttggctagatcattactagcaagtgtgctatctagcatattacctaatggatttacaatcttttcatcgttgcagatattgtcaagtccagcctcgtgcatcattgcgtgtaccatttcgtgcatgagcgtttgacgctgcttttgttctgacaattctttgcgaatgtaaatcgtggcaccaggataatcagttactccccaacaagcatcaccggaatcttcaagtcgcttctttaagacaacggtataattaataccactgatttttacatacgctggtagtttcatgttgcacctccttatttttatccaaacgaaaagcgccatgctgtttagcacgacgcttcttattcttgcaccacttatctaaccgagcatctgcttgtatccattcaggcggctcgtagccatatttactgggcattggtcgtgacattgtgccacctcctttaccttaatcggtaccttggctcatgattctttatgctctgttttatatgcgacataatcattaaagcttttacggctaataggaaacagcatttgcccacaatatgcacaatcacaactgttatcccatccatctgcagctgggtaagaatacttaataattttattaattcgaccacagttatcacattttctttgactttctgaattcatattaattcctccaattgtttattatattcattatataacaatcggaatctaaaacgattattttagagaaagcaaaagcccggttccgaccccgggctttaactaatagacaatgccagcggcagagaggagcgcatcaccccttataaatccgccggctacacagatagctggatttgaaccaacataaacggttttggagaccgccatcttgccaattagatcatatctgcttaataatggtacttaattcagttctgtgcgcataaactaatccatattgacaatgatcactgctggaccatcaaagttaaagactttctggtctccaacagtgatttttgcttgctcctctaactgtaagctaatggtctgaatgcctaagcgagattctaattccttcgaaagctccttagttgtcacatcctgtaagtccattatttcatcttcctctccttaaaattaacgtagcctgctggattcgaaccagcgacaacctgattaacagtcaggtgctctaccaactgagctaaggccacatgaatgctagacgtacaagctggggtggcttacctaacattcgataatactaatttactcccctttttgactcatttaccggaatcaacacggaaacttgtcggaatttactcggaattttgtcggagtaaatttagccctcgtcgtagtgagcaataatctctggctcatactttttaacgatcaggtcttccacgccatccggatatatctcagcgaacattaactgggcttgtttcaaatacttattaaatgttttgtcggagatattcaggttaatcatgcacttagtttttgaataccgtttaacatagagcagcattaatagctctgaatatttctccgtttcttcatcaattgtaacagcttcaatgaccttgacaactaaattagccataaaatcatcgttagctttactaacttgcttgtcttcaatatggttgccatagctaggacttttaggcattccgtccattgctggactttgcaggttgaaattaaccctgcgagctcgtagtcgccacttccaatagtcttttagcacccgttccgcattagcaattgttcgttcttcatccacgtccttaaaaatgctctccatcactgccaccccttgttttgactgtgctataattaattttgtaggaatcaatcgtaacggcgtcagtgatggcggcgctttttatatgttatacttacaacggtcattcgagtggtcctaatggctagccgccttaattggtggcttttttctattgccattaatttccaatagtattagaatttaatggcacgcatgtgcaagccaatgctcactacagttgtgaatagtagtgagcttttttgttcacccatgacgttgtataacccatgtcagcaagagcgcaataactacataaacaatgatgactcctagcacgattgaaccaatccaactaactaactgccacggggttgcgttccatattgcttcaaatatctgtttcattcgtcttcctccaccacatacccgtctagccacgcacgggcaatcaattcttgttcgtcatagttcaaaatcaacgcgtcagtgaatattttttccagtcgataatgattagctttatattcttcaatcgtatctgcccatgatttaggaatcactggcatttcggcataatcctttttaaattcattgtttgtcataattaggcgaatatttcccgaacattcaataatccaatcatcaggtttaattgaattttcatcatatccaaaaacagtaaatttatcttctggaatataccaacaaggttgagattccggtgtataactagggtcgcctataaagccattaccatcttcccattcgactcccatgcgattagcagagtctaaactaccatcgaactgttcggcctcaattggctgtttgcgatagaacttcatttttccgcctccaatagctccgggttctcatgcacgttgccaataactaatatactttttgaaatttttgataataagccatatttaacacagaatgcgcctctttcgaaccttacttcatatctgtttcctaactgtccccaatattgagatgtaactttaacaatatcgccaacataaatatctctaccgttcacgtctgtcaggccggtaaactgctcaatcactagtttttcaggtgttattgtgcctttacatttaagacctgctactttgactttttttaattcgccgtcagggtaaaacttaatttctagtaccttacgatagccgcttgtcactttgtcccacgctctaaatttaatcatttgtccgcctccaatagctccgggttagcgtgaacgtttccaataatttcatacgttcggtacttgtcagttttccagatattgtactcgttatttccagttacgaagcaccagctaaaactaactttgctaagtttgactactccaattttaggcgatcctaatatcggttcagtcggtctagaaacgataatatcattttcatagatgtccttgccgttcacgtctgtcaggccggtaaactgttcagggatgtatttctctggctccgtttcagcaagtgctaaaatatggcttgctctgctgtacaccatttcttgcatagcaccatactttccaaacggcatataccacgctctaaacttaatcatcgtcgccatctcctaatgtaatatcgtctatttggtcaagtacccatttacagcacgcagacactcctatgagacgtgcctcgtcagcttcacgcttatgctcaattaaaagtttacgtagctcttccagttcttcactcattttcaatcctccccgaacgcttcaaacgcccgcttgcgttcctcgttagttaattcatgaatatgtctctaaaccagcagtatctccgcattatttagcatcttctcgctagccagcttaaacatttttttgctcacctcgaatccgtaggcacttctacccaactcaatggctgctcttaatgtcgacccactaccggctaccggatcaatcaccacatcacctttatctgtaaatattctgattaattcttgaagtgtttggattggcttctgcgtagggtgaatcttggggtagccgttattactgccccatttaaaccaattcttaaccattctgccgtcattattaaacttaggtagcttatcacgatatagtacaatggcgtattcacatgctccaacaattttcatgtttgctttgagaacttgtgaagaagactttttaacaaaaatcaatgggtaagcgtgatcaaagccatattttttcccgtagtccatcaccatttgaagttgttgaaaagcacaaaatacaagcatagccggcgcctttccagtctcctttggttccttaatcaacatgtgcgaacagaagtgcataaactccgaaattctaaaatcaacatctgtgtcgaagaaagcagcatttgcttttgcactttcacctttagagttgtccccgccgttataccattctgggctagacgcaaaggcgttgttcgcaatgttatatgggatatctgcaatgactagttgtgctttgggaattccatatcgcttatagttctgaaagttatcgttaaataatttaattttgggttctctaattttctccatttccatccctcgttttcatgcgccggtgcttccgtttaatcgttgaacgcttcttagtgtgtttaggcattctcgtcctccgtaatttcatctatttctactcgcggatttcgtttatcaactgcaaattcgtcctgaaatcccgtgatatgctttcgattgtcgttgcctaaaagcccagccttcataaagccgtcaagcacaaactttttagcaaacgcgatattgtccgcatcttttcggttgtttttcgtgtaccacgtgaatttgagcttacaaggccagctgaattcgactccagaattccgacttgctcgcgcatatacactacataaggccgtgtaccgcttctttaggttagctgccgcataccgattggcccgttcagccttgatgtactcatttaagctaggtagttcgcccttaatcacaactttactcatactttcggcacccggccaatgtagtagccattaacgatcccgttagacatactggcctgtctaatcgaaaattctggggcatcaatcctcttacataatcgcgccagtgtttgataggcgatcacttcatcaggattgttatacttctcagcacgccagtaatcgttagtcagtggcaggctgtatttatggactaaatcctttacccgatttaattcaattgccgtactatcagctagttctctaagcgtatgtttgccatgtttatgtgcttgccgaatggctttaatatcttcacgttctccctgcttcgaatcttgtttcatactggctaagtaagcttcatcactgcgtaccttagtcccaggcttaaccagtctaaccggaaacgaccattcaccagatttgtagttatgctgcgtgagcttaaacatttccggttctgggcctattgctagtgggtgatcgatatcgggtctgtcagcattaattactagcacctgtgtttcagtcatgcgctcacctccgtttgcaatccttgtctagcttgctctaaatcaataaaatactcggctggcttaccccaacattgggtcaaatcaaaatttaagccatcccgctgatattcaataattaaaacctcgagtgcaaatagcttgtactcatgagcacatacctcatcttgcgcactaccaccggcctttaaatgccgcttcatgcgctgcttagtccagtgcaatgcggccggttcataggcatggttagcggctaacttgactagttggttaccccaattcatttagcttcctcctgactgttcatgaacgctaggaacgcctcgtcactcatatcgtcctgctggttatcacttgaatttggcttagaatccgcctgagaagcgccgttttgcatccactttggcgtaacttctttacggtgtggctttgaatatccactaggttttctttcactcttcacgcggtcgtcatgattagcagcagcctttttagcctgctctaacgtcgtaatatttcgtttcttccaacccgcaacaattgcacgaacgtatttcaaacatgcattagatttaatctgatgttctccagcaacccaaattgcataggcaatcacctcaggcttgaactcttccagccattcatcaatctcaggtcgggcaataccatttggaaatccccacaggttggtccaatcgttaatgacctgctcgcgcgtcacgcccgcgtcatcatcataagagtcagtatcagtcaagtcagggtcagtactagtaagttctttatgttctactggttgacctccaccttgcccaaccggttgacctactttatctaaaccagttgacctacttttatgacttgtagttgggttactggttgggtaaccagctgacctactatataaattaataatgcgatattcaggtggtttcacatttttcttgcctctaacgtatttaattagtcctagttgcactaatgagttgcgtgctttatcgaggccgggttcggatagtcctgtaagactgagtaatgccgaatttttcatgcgaaactgaacgtccaacttgccttcgtcgttcgcatagtctagtaactcgcgatacagattattttggccgttagagacactcgcttcatacatcttaaaattacggtacgctcgtcgttgtttgaagtaatccaaattcgtccctcctttactaatgggcctttcacccgttcggtgtattcagtcactgctgcattcaagccaattctgtttaatcaatccatgggcaagtcgtctgcactaacgacactctctaactttttggtactacgacaataagcacaatgtccgcattgggtaggatctgcttcgcctttaatgacatcttgaatatgctgttgagagtccaatacctggttcatagcgttagtaagtcggtactccggtaaatcaatagcttgcttgtctggtggatcctgtttgcttaccgcaacaatatatggcttacaattaacgccgaattgctgcttaatcaactcttgatagactgccatctgaagtgggtagttatacgcatatacaaacggttcccgttcacggctttcttcattccaataacccttataaatatcagcggtcgtctttagatccacgaagtaaccttgtttcaaatttaggcaatcaatctttcccttccagggataaccaccgatttcaccagttacaatcacttctttatcgccttgataaagaagattaaaatcatgatcgtcagataaggcttcaatcatggattcagcaattttgaagtcctttttgagatggcctttgcttgggccccggcttgaaattgcctctggatgttcatcaacaaacttggcatgagctttctcgctttcgaagtagctgtgaagccaatttccaacgactagcgccgttgagttcataactggctcccatttaccctgcaactcggctaacgcttctgcttcacatgctagaaaccgtttaaacaccgtcggcgacatgtaggcccggtcagtccagttctcataataattattcggcgtcagcttctgatccaacatcattgaggttgtcgaagagattttgctggtcgacttcgtctttgacaggttcttgatcattgcttgatgcctcctttacagctgttctaacgggttctttagctggttcggcagattctaccttctcggctttattctctgctacgtcagccaccaatgaccttttagccggtgttacgtccttcggattatcattctcgtactcggaactcgtcgtgtcgttaactgcttgcacgaacaaatcgttgtcgcttgaactgttaatgtagaactttgcagctcgattaattacagtccgtttagccatttcctctgggaactcgttttgaaccttcttcgtcttagcatggctccaactggtgtcgatgtcttttttagtcataacagtgtaggtccggttgccattcagatcttcgacccatgcgaatgctccgataattggcttgtctaagttctcaaagcttggctcgaactccttaaccaccagcaccccattttcaccgccaatcttgaacgtgtcgtctttgtggacaacctgtgcctgaatatccttaacgtttgaaagacgctttacaacgctaattgagccaaaataggagcgctgcatgactaactggttgccataaggaatgaaatagcattgatttttagccgggctcaatccctggattgccatgttcatcaacgccttgataactgatccttggtcacacttatcaagtaatggttggcccttagtggtatcgctcaaaatcagatacgcgctgttcagtgcattccctactgaataatcaggtggtaatgacaagccttcattattcttcatatcctcaatattgttattaaccatcgtaactaactcattactcatgcttcttcctcctccgatacccagtgatagcccagacgtgtcatcatcgtgtccgtgtcgatgtgtgccagtagctcgtcccatagacgggactgaccaaacacatcaatcaaccattgccaattaggttcctcaccttgatctggatacaaaacacttacgtcagtcgaaccgaaagtgacgatacaaatggcgctcaacatattggcctgcatatcagtcgcccactgcttaaagtcattgttatcgatgtaatcttggaacaactgtgccttgtcgaactcgtcaccatcgtagcaatagttatctgcgtcaagtacccagtcacgtgagtcgttacgttgctgccaatgctcgtttaaatctgcctgtgctggtatcatttcgtccacctccgtgctaaacgttgtcttagtgactgtttcggagtacaatagaactcgaaaataaaattagtaagcgtcttagctgcacgggtactaccaatactcgagcagcttttttcgtactcaaatttaggctttggcgatactttgcgtacttccaattcgttcaacctccttaaacgtgttaaaaagactatctaactcctgaatcgtgatctgcttgtaaagcacatttccaatcctgaatgtaaatttcatcgtcttcatctccttaaattccaaaccagccagcaacttcatgacgcttgaaccacaatgcagttaacgcgcagcctactaatgctccttcaatcattgctatttcctcctagccatttttccgattaactttatcgatgacttcttgcaatttatccattgggataccggcatactcagctttcttagccaaatcagttatctcggcgctgatctcttccgcgtattcacgtgggtagcgttcaataactaattgctgtgctggtgttcggtctctcggcttgaccgcaatagcttcttcgaactccgtctcaagcttctctcgctgacgttgctcctctctctgcttcatcagggctgaaaacatatcgccttgtaaccgatgatcattttgaaatgaaagcacttcaaaattctctcgcgcaccagaatatttaagccaaaaatcgttaattttgtttgctaacgacttccgaatttgtggatcagtgttccttgacccgtttttcaatcgtgacaactgcccgggagaaatatgcgtcccgtcggcaacttgctgctgtgttgattctttatgcctgtccaacgctaatgacaattgctctgcaaacttgttcttcatacctacacctctgtattttggaaagggctttatatggcctttccgtgtaattcacttataatttagttagtcgggatgatttaataggtaatccatcatctcagctgctggaatctgccagccgttatgggtattcacataatcaatgaagccaccctgttcaatatccaaatcatggcgatgcttgattaagtatcgcgaagctcgttcggttgacttggttccgtatttatacttggccaaatctttgagcttccaagtacgaataccacgttgtgcttgcttccaggcttggaacctctcgtattcttcttcgctaatgaattggaagccctttggagcctcatgccgaaccaatatcgtatctgacatgttcgtacctcctaatatgaaactgacataagttggctagcttgctcgttatactcggccgttactgctcgaaattcagcatctagtgctttatcgcttagtgcctcaaacattactcttggtgtttctggcttaacctttgctagtgcattgattaatgtagttcgtgatagatgtgtcattttgccgcctcctttggctttgtgtcactttttgcaacttttgagaacaaaaaaagtgaatcaattggtctctcaaccccatctgatattttcttagcgactttcggagatggtttccttccatttaatatttgagataaatatccataagaaataccgttcttacgggaaaacgaccgtactgtctcacctttcaggctaattagttctctgatttcatcagagttttttacaggaaggactactgccatgtcctcgcctcctttcttgattacataaattattataatcttttgtttcactttttgcaaccacttattacgataatatttcactttttgcactctattgtttcactttttgctataatccagtcatagaagggagtttgacgccatgagttcaacggaaaatttacgtaacgaagtgttaaacttcggtccaaaaatcaaagaaataagaaataaaaaacgatttacagttagacaagctgcgctacaagcaggaatatctccatcattttggtcacaggtagaaaataaaaaacgcgagattcccaaaccaaaaactcttcaaaaaatggcaacaggtctacgaattactgatgatgagatttttaaactagctggtattaccaaaaatcagaatagcttgcctacaaaagaatcccattactatgatctaacagaaaaagatgaaaaaagcatcgataaggaacttgaagatatgatgaacgggctagattccaaacattctttatcatttttccaaaatggacaagagctatccgatcaggacaaagaactgctcaaagcgtccatgcgccaaacattagaattatccaaacaattagcaaaaaggaagttcactcccaaaaagtatcgtaatggagaggaataataggagctggtcatatggaacggtggattgaagaagatattgaccacttaaccaacaagtttgggattcaaagtgcttttgatttggcgcgtgacttgggcattaacgtgcaattcaataaccttggtagcaatatttacggctacaataataactcgcatcgaatcccaatgattgtcattaacaacacaattgatgaacgaactcaagatggtgtttgctatcatgaaatttttcatatacggcatcacaagggatttaatacgcagttttttgcggtaaatacgacaagctttctatccgatgacaacgaaacagaggctaataagtttatgctggccatgttgaaagaggaatatggttggagcaaacaagaagatgttttagacttcttagatttcttcaagctaccacacgaactggcttcgttattttaattagcttttgttagcatgggaagctaacaaatagttcaaatattttattttagatgtatgaatgggattttattggggaataacatatttttggaggagttttaattgaaaaaaacaggtttatttcttgcatttctgacaatagtcatgctgctctctggttgtgcaaaatcagctattacacaaacacaagcaaaaaaaactgttcaaagttctctggatttgtattggcaaggtattaacgactgggcggtagatacattgaacaataagcctacatccactaaagtacaaccaattatcagcaaattaaaaaaagaacgggacaaacttaacaagtattcaaacaatacattactcagagaaactagtacgtttaacaacgacttaacccaagccttgatcaaacttaaatctggagatctatctggtttcaattcttatacaagcatgtccgcagatactggaaaaatcctaaaatctaaattaggggcatttagcagcccatacgaatttgaaggcaaacgcaactatgtagaagcagcgtcgtccataaaaaacaagataaattctatggatagtgattcaacaacatcatctacatcaaaaaaagcacattcttacagttatgaggcagcttctgatgatgaaagcgaaacagactctactgcatcagaagagactaatacgtcatctgactcatcttctactgggatatccgacatcgcaatcgaagacaccatcaaacagcatgtttctgatgtaaaggtaaaagaagtcagcggtgaataccataaaccggtaactaccggcattgatataaatgtcaaagacagttccgattactatgatgaaggtgcttataaaaaagacgcctaccatattttgctagcgattaaggatgattgcgggttctccgacttcaaaaatattactatcaccttttacatggatggcgatgcactggtaaaaagttcctttgaccaatctgcactcaaacaaatcaaccataaagatagtaactactataatattgattcggtcgctaccgaatggaacacagataatctgaatgctaagtataatcagtaacccgagtgaccagataggatgtcgataaaagctaggagttgggactacttataattcggggaattattattattggggaataacatattttggagggattactttggaatcattttttatacttatgttctttttatcgctaattgcactggcttatttcttaatcagatggggaatttatcactttcaggaagctgggattgatcgtccctataagaaatacaccttaatttcaacaggaattgccgttctatttttaatattaggtatagctgtggccccttctggtacaacaaaatcaagtgcatcacagtcagatacagtctcaagtagcaaagcgaagaaaagttcagcaaaagatgcatcgaaaagaaaggctagcatcagcaaagctaactctattaaagaaaaggagtcatctgaaagtgccctatcgagtagcaaaaaagaatctgaaagtattgctgcctccaagttggaatccaaagaagattcagagagtatagctagttctgaatctgagtcgagcaaaaaacagtctgaggcagaaagctcttcaatagctaaagccagttcagaatcattagccgctagctcgtcatcagcaaaaaaagcgagcgaaacaagtaaaacagacaatgcttcctatacacaaaatggtggttggactactgctgcttctggtatggtttttgtatcagactccaataagtactacaccagcgttaaaaatccaggtaattaccaatatatggcccagagtgctgctgataattctggtgccaagccagcaccacggggcaatcaatacgcaagaccataacaggtccaagccctcgtcggggctttcacgcgagcgtagttcaacggtagaacagtactcctttgaattgctaactagatactttcagatgtaggttcgactcctgccgctcgctttaaccagaaagaaggcttaatgctatggataatgaaatttcaaaatacgagctaattgccacgatgaagaaagatatacagacatttatggactcagaatccatgttatatctaaaaaaagattcatattcaacagaagaatataaccatatgctgacagaagtaaaagatgatttaaaaacacggctattgcaaaaataattatgaactcagtaaatgatagtcagccctagctgacttcacgcgagcgtagttcaacggtagaatggttcctttaattcaaatatagcctaccttccaatgcaggttcgactcctgccgctcgcatagagattcttaactcaatcaaacacaggagaatcaccaatgttcaattctttaacttattttttaaaaagcctgtcccctattaagtggagcactgagctattatttgtggcaattatatcagcattaattgcatattttctctataaaaaacttcatcactaattgattacaaacgtgggtgtagttcaacggcagaacagtaatccaagtcttgaagcccattctttcttggactactatgcaggttcgactcctgccactcacattgaccagtcaggatgtcattaaaagctagagtatattttcaggaggatatttaattgattcaagaattcaaagaattatgcctaaaaaagaggatgtcgaagccgatcctattccaacagctgaggaaaaatatctttcagaaattgtatcattattaaagcaacagaaaagataattacagtaagaaatcaggtgccatttatgaaaaaatcagaagatttatctactaatgattggaaacaagcacagtctgccgtcttcaaagagtacgaagattttattaaaagagttcaagaaaatggtgtagactatgctattcagcatgcaagacgtttagtaaattaccaaaaattagttaccgaatggaaacataaaacaaatattttaatggacgatctatctaataaccacgtcgctttaagtgtttttaaagacttagaagaaggaaaagaaagtcatgttttgagtagagcttacgagattatgaagaagtggccagagttcagcccagaaccattaaccatttggctagagctcatcgaagactcagatgatgaataataaaactaaatgtcaaaggaagaattccaaatgaagattatcaacgtcgcattgcatgttaaaccagagctcaaaaaagaatatgaagatttcattcatgaacttgttattaattcagcacaagaagctggtaatgaattctatggacatttcaaaaagttagatagtgataatgattacgaaattattgaacactggaaagatcaagaagccgtggattttcataatgacacccctcatttccagaaatttctagcacacgtcagtgactatctaacttcagaaccagaaattaccagaatggattattagctttctcgctttgcgaataagtgaaaaaacagcacttatttgcaaagcttccggacctttagctcagttggttagagcagacggctcataaccgtccggtcgttggttcgagtccaacaaggtccatttcacgcgagtgtagtttagtggtaaaacgacagccttccaagctgtagtcgcgggtccgattcccgtcactcgcttagtatcacttaaaaagtacatccttaccggtcaaagtctgcaaactgtgctatgatatttttaattagaagccgaggtcaagttatgccctacgatgaaaccaatttagaagactcagaggttaagtatttaatcgattcgcttaaaaatccttccaacaatttcgatatacatgaagtccagaaaaagcttacaactttatcagaagaaatagattcaacaggtgttgtgttaggacttgttgatgggattgaatataagttacatttcttttgtgggaacccacagagtcctaaaaagagattctctatccacttgcgatttgctcaaagtaataatcatttggctagagtagatgttggtagctatcacacgaaccctgaggggattagaccacacagaatatcatgtcctcacattcatatctatgataataggtataagaaaaaagatcgtatagcaatgcctataaatggtaataattttccaaatataacaacaattataaaagcatatcaggattttcttgatttcactaatattaactaatttagcaaaaaggaggtgcttctccatgcaactaaatgcaaataacttgaaaacatcgtatttaaaatggttaagtaaaaatgagcactataccaatatcgatagcagcgaaaatagcatcgttgaaattgatactccatttttagacaacgagtttgacgatattgtactatacgcatacagtcgtatcggagataacatccttgtgactgatgatggttggacaatcgataatctagaaagtaatggactatctttcgacaaacgtagtaaaacaagaaataatatactaactgatacgctagatatatttggtgttcaaaaagatcaaggatcaaaaaaactgtacattcgaacagattttgatggatttcctgcagccaagcaaaggttagtacaggcgatattaaaaattaatgatttgatgtacttaaaccgtcctactatattagatgctttctcagacgaagttcagaagttctttgataaagaaaaaatactttatagccgtaacaagtctatctctggaaaaaatgctttatcgtttcagtttgattttatcattcctcgatatgatgggggggacaggctcgttaggaccttttcacagcctaaaagagacaaaaaccctgctaaaatatttgcctgggactcagaaactataaaaaagatcaatggaaattctaaagcttcttttattgctatcttaaatgactcagaaaatagtacagaatctgtaaactctatttttgaggacagtttagtccaagtaatactggcttcaaagttagcagataatattgaattattaaaaaattgagtctcctgtattgagactttatttaacaggtgaacttacaatttcagtgcaacactaaaattatgcattactaccttataccccatcacggggtatatattttaagtcagaaagaacatacgtttgggaatgtcaacctattgttatttccagttgggaggaataaaacatgtcagtaaccaaacttaataatggtaaatggcaagcccgtgtctcttataaggatgatgacggtaactataagtcggttactcatttagaaaagcgcaaaaccgacgctgttgagtgggaaactaaaactaaaaatgctctgctggaaggtgctgacttatcacgtagcaccgagagtctaaaacactactttcttgattggatcagaatatataagactgatggtgtatcgcgtcatacccacgagctatatatgggcaactggcgccacgtctctgcatattttaaggataaacctatgagctcaattaaacgtccagattatcagaagttcctgaatgaatttggccgcagtcatggaattgccacatctcacaagcttcatcaacaagtacacactgcaatcaaagacgccgtagctgatggtattctaaaacgagactttgcttacaaggcgcacgtcactggacgccctcctaagcccgtagaggaaaagtatttgacgttgtccgattataagaagctgcgtaaatacctcattaaaacggctgattatgatcacatgactatgctaatgatgctgtttcaattagaaactggaaccaggttcgaggaagctgctggtctgacgtgggataatttggatttgaataatggaatagttcacattaaacagcagtgggacgcccgtagacagacttttcgtccaactaagggaaatggacaggccgatggagatataaccataggacccgcctactgtcgttttatgaggagctatcgtaatgcgcagaaagattatttagaattacacgaaatgaagaatcctaagaacctcgtattttggtccaaactaggaaaaatagtgggcaatgggaatgcaaacgaagagctaggacgtatttgtaaccgtctaaagatcaacaaagttacaacacacgccatgaggcacacacacgcttcgattcttatcttaaatcatgagtcccttccctatgttcaacatcgccttcgacatcaaaaactagaaacgaccgttaacacctacgtccatcttattgaagaagaaaacggcgtatcagataagaaggccactgagctaatggacgaaggattttaaaaatggtaattttatgattgctgaagtccttgtgccacaagggattacaaaatcatttgttaatttttcttccaaaaactgctatattttggctacttttttcgtttttggaagaatcgtggaagaacatatcgtgtttgagtggttttcgagtgtaaaacaaaagcaccaaaacgcctttatatcagcgttttggtgctttgtcgtttctctatatttgtcaacttatcacccgcacggggatcgaacccgtaactccgccttgagagggcgacgtcttaaccaatttgaccagcgggcacaaattcatttattatcttaccgaatgataagcggcttgtcaaatataattaagatttttgccacctaaaaatcgtcacaacaactaaaccaacaaataagagcaaacagtagaccacactacaccaaaaaacgaaagtcaataattgcggtaacaaaaagctgcgcataactgctaatccgatggccgtgaccgcccatacgatcaattgttgtcgcagatgctcgaataaatgatctaattctgacttcgacatacactcaccttccatttaactagtttagccaccaactgatacgatattcaagcaaaaatgcaaaaaatagacacaaagtttcagcaaagccttgacagtatttgctggaaaagttactattaaatagttgttattgggtattcgccaaattggtaaggcagcggactctgaatccgtaatttactggttcgagcccagtatacccaatattcgttatcagctgttatcattggttgtcaaaaacaccgtgattgcagcttttttattactttagtttatcattaattgtcatctcttttcactaaaagtcagccaaaaggacagccaaaaatataacaaaaaagccactgtttccagtgacttaatacttgcgcggggcagtgactgttagccaactttggttagcagtttttttcgttaggccattagtctaacgcttattatcaaggcaatgactgcaatagtaatgtgtatcacaaaaataacctttcttatagttttaggttcatgataatcaaacggccactgaataaagtcaaatactgacagaatcataaagttaaacgctaataaatttagcccataaacagtcaccggcatagacaagctgaaagccatgcggccatattgtaatatgctacatgttatcaaatatgccggaacaatcaacaatgtaatatttacagtaacttcgaacaaccattttttaatgaaataactcatttacaaggacactccagtaaatatttaactgcacattattaattatacagtaaaattgttgaagtttggctatagtagcattcaaaccgttagatcactgtaaaattttgcaaaagcgtgtaatgcttcattcttcatataattaaacttgctaacactaaccgataattggttacaagcttcattgcgggtgaaatgcttctcaataacgtaatcatgtaaaataaattgatattgtggatcatcaattgcatttagggcgtcttcgacttcttttagctggtaagacaggtcaacatggtttatcaggcggctttcagcgccgtttcggctgctatggcttgacactccatcgaatgaggggctggaaacttgattaaaagccgtcaaatcacgttttagtttggcatattgctttaataaattacgaattttcttaacatcttgacgcatcggaatcacactttctgatcccagatatatgtataaaaaagaggctcgggggaagagcctctcactataggatatgataatcgccgttattacgggaaagtaatattaggacaaattacaacattaattttagtaccaatcatttcatatgtcaatcctaagcttcaatttttccacgcagttgttgaatcatactgacaacttgatacggtgtctttgtcatatcagttactctgttttgataccagaattgtgtcagcaaggacaccgcaaaatcgtactgtttatagacagtcagatcttcattcttgctaacggccgtctgcacgtagtccttagcggcgtctaaatagctttgaatcattggatcatcttcggttacatcgattcgcaggcttagtttaatgtcgtctacagtcactgacaactaatcacttcctcataagtttaactttactctcataaaattatatggtataagtatagagtactcattgctcggtagttcagcggtagaataattgactgttaatcaagaggtcgctggttcgatcccagcccgagcagtttccaaaacacatatttatcataaaaggccgtgaccttgaagtcacggcctttttattaccaagtcatagcataatagattacctcaaacactttaaaagcaacatatgcggcgaatacatacgtgatgataataccactgtatgcaaggataaatgtgttcttcatggaatcactcctaaaattatagctgcacgctctattaaaatctgataagcgttatcatcatactatcacttgttgcttgaaatcccactcattttgtcttcctatttaccagcagtcgcagttcctaacgccacgttgattacagcggttttatcaatcacttcataatcattccgcacaattacggaaagaccttggctgaactggtcgaacttgtcccattgggcagttacttggttacgccggaaaacagccaccgcttgtgataagtcccccgcaatcattgggaacgtcccgtccgcgttgttagccagtaatttatcactgatcatgacgactggtgcccctaataaggtgaaaccactgggtgctgttggattaggctgtaataagtaacggccctcggtgtccttgagtgtatcaaggtaattaaacccggattggttcactagccacatcttgctcaaggcgggatctaacgtcacgttgaaaatctttttaagatcatcaatactggtggccgttgctttagcaaagctactacccgttaacagtcccatgatctgcgtgttgtccgtgttatcaaccaattgttgtaattgcgttttgacttcactgacaatatcaacttcggcgtcttccactacttcgttagataaggcaattttacccgcccgggtcttcacatcaaacggcacttccgtaaacatgtttgcgtcaacgtcggcaatgtccgctagttcgttcttagtagccagcaccgcagattgttgactagtggcaattggataagtcccggaaccgctagaaacttgcttaaccgttgcatattgggcaaggttgtacttagattgctttaattggaaaacaggggtaatcagttccttaggaataacggcactggcaccgtccgtctttaaaccgtcccgagtttccccgtgcgtccggacatattgttcaaaggcgggaataccagttttgttttcgttgccattgtcgttgttattgggatcaataattgtttgttttgccatgttatcaggctccttttcttggttaataaatttttcatagctacgggtatcaacttgaacattggtatcgtcataagcgggaacagcaaccactgaaacatcgaacaagctcttaacttgattaatggttcgggtgatattgccatcatcatctttagcccattcatcggtgttgtcgtcactatcaaatccaaatgaacaggaatcaacgttcccactttgaacttcttcgtatacatcattagcaaaagacgtatttggtagttgcgcaatgaaatgtagccccttatcgtccgtttctagcgttaacgtgcccgccttgacactggctaacacttgggtatagtcgtggttattaagcataagaacgtttgataaatcgacaccatcaagggccttgggggttacaatttcggtgaaaccgcctaaatctttgcttggtgaattccatacaatcgcataaccgctaattgttttgcccttagatgtctgtgagtctttaggttgcgggtctgctgaattttcagctggcccgtctaccagtgtttctggctgtggtgtttgtgctcgcaactcggcgtcaatcgttaaccgtcggtcttgtttcataaattagtcactccattcttttgtaagtttaagaaaatatcgccattgtcagttgggggtaagccaatcttggcacgggcttcattgcggctcataatgccgcccgtataacccgctacggcttgggcttgctgggtctgggggtcaaggctcaatagcttgtccgtattaaacgtgaagtcatgaccaagcttaaatgatagctcgctggtaaagctatcaaagtaatgttgcaacgtgccttgcagatactgcacgccactttgctcttggttagaatgatcattttcaacccctaagcgctccggtggtaagccaaaggctttagcaatttgtcgggtcgtccagtcattcgaattgaccagctttaatacatcggtatttaaggataagttgctaatgtccatcgtatcgtcagtcacaatcgtgttgatcgcgttgtcacccgtattggcttcatcaaactggttgcgaatattgcccttagcttccggtcctaaatcagattgatggactttaataatcgtggtgccgtgcacaccagcagtaaaaaagccggttagcaatttattgccggccgactgaatctggcgctcatctttgagggcatatagaggactaattcccgatacgccgtctttggtgaaatatttgaaatgtaaaatgttgttaggcgcgatctgacgactgttaccaccaatcggggtataggtgtaggttaacgccccactgacgtcatcttgttcaactgtcaattggttattggcaatcaatttcaacgtatggttaggcaaaatctccgcaaaactattgccattgagtaacaggttggccgccaacgcatatttgaaatggtagccgtccatttggctattgggggtctgattaatcatcgtgttaaaaatggccgtatcgcaaacaatcggattgctggcaatgtcgctcgcaataatgttaattgccgcgtaaatgtcactattacgcaacaccgccgcactcacaaacgtatacgagtcattgcttgataaactaaccaaggcgtcagctaccggatcatgcgtgccgctggtggtactgcttttaacgaagaaactcatttaatcacctctttgcttttcataattaattagcaaggccagcataatcatggctataccagccaatattaatcccgcttgccagctgatccagcaaccaaaaccaatcactaagcagattaagccaagcaccaacaagatcgtttgtacataatcagaacagatctgccgcagtcgctgttttgtagtaatcttctgcatgctgttgatcctcactttcttggtaatagtccataccggcaacgtaagaattaattaaggctgctaccgggtcaatccggttgctattgcgtgccttatccagttgccagccattgtttatcactttcaagatggcgttattgaccgcataagcgagaatcttgttaccgttatgtttaatcttgccatcgtaaagctggtcacgaaagttacgggtgggaatattcaaagtcttggtgccttgtcgcacttcaaataatggataattgagtttttcaaacttagtaatcaaggtctgcgcattgtatgggtcatacgcgatggcttttactttccagttatattgaccgaccagattttgcacgtagtcgaatagctcatcataatcaatcacaccgctatcaaggcgagtaatactacactcaccagcgcgctccattgaccggtaatcaatcccatcacgtttaatcttagaatccagtccgtacttcgtgccaacaaacgaatgactatcacaataaaactgaccgttgccaattggaacgagccaactaaccgcggtcaagtcattactttttgataaatcaatgccaatataggcgtcacgattatgtaagtcgggcaccttggccaatttaccagcggcccaatcgtctgctgaaatataactgtcctcgctggcttgcaaccacatattgaagttcttaaccagtaccggaataaggttattttgcttaattgcaaggtcaacatcggcctgaattttctccgtcatgcgttgcttaacgtgtggttcactgaataacgggttcgccttgatccaattagcttgatcgtaaacttcttcgcggtcgtccagttcccagattgccacaaaataacggtcagcttcggttttgccctttaaaacgtccgtcagcatgtcatattcggcgtgcattggaacgttaaggttaagacccgaggtggaaatcaccgccagcagggaattatcctcttgcgcctgaccagactttaaaacgttgtacaccttgcggtctttagcttcgtgccattcatctaaaataacggtagtcccggcataaccatcaagcgtactggtatcactggcaagggctagggcttgcgaatcagtttctaggtcggtaatggcttgtttctgtaccttaatccgttgccgcatgtactttgattgcttacggacttgtcgtagcccacttgatagcatgtcgtagcctaatttagcttgtttaagggcgttgctgacgaataatacctgtcggttacgggcgggctgacgttctcttaaaagcccattagcggccataccagaagccagataggttttaccgttcttccgagccatactaatgaatgctcgatcatagcgccgattaccggttgctttttcacgccagccatacagctcactgataatccatttttgaaagggttgcatggtgagtttgctaccgtcagtcttaggcattaattcgataaatttaaccgcctgtgccgctttgtcttcgtcatagtagaacgggaagctgtcttctttagaacggcttaaatcgcgtttaaatcgctcgcacgcccatttaatcttttgaccagccaacacttggcccgataaaacttggtcaacatattcaatcatgacaacatcgcctcgaaagtatcttcgggtgtctcatctttctgcttgtttaattccatgcgggcccggctcgatagcgacatgcctaaatcattggctaaggcttttaaatctttcatcgcttgtgactgcaaggccacgtaagggttcggcttacgtacaccagtatcttgattagtttgtaccagtccgttcttacgaatatcattctcacaagtctgtaccgttgcataagcgcggcaataactggctaacatggcccggtcaagttcactaattggggtattggcctttaaataaggcgctacccgttgccattcagttaaggcccgatcatgtaaccaatctggcggggttaaatcaagcaccggataatcaaacaaggccctttcagcgtctttacgttgatcacgctcatcattggttaaatgtttcttcatactggctaaggcttttactttttggctcattcggagcactcctttcgtttaaatttacgtaccaaaaagcccccacgggttagacccatagcggctgattgatacatatatccagaattcgtttattatacctatattatcgcacatattccgagaaagtgcaattaataacatgtttatatttacacatcaccccctgactgtttatttgttcaaatttcgcattattagtagggatatttcacaatccagcaaaatcagcaaaaaatcaaagttcaaaagggacttttataaacccaaaagtccgtctgtcgctcctctcgggtcggccatagccccccatatcaacgtttctgggctgtcatgccgttttgaattagtctcgtggccgaaaattaagccgccaacttgaattgcaagtcgaaaatttctactcactaactcacccgaaaattcagggcagtattccgcacttgtgaggaaacatctttgctgtccaactcagccgaaaactcgtcgcagtcaattgccaagttgggcaacttagacgcaaaatgcgggttggttaactcggtcgaaaatttcgactcagtagctcggctgaaagttcagcgcagtattgcgcagatctattgcctaagttaaacttagccagtctggttcactcagcggaaaactccgctcaactaaaaagcgccgcacctttcagcacgacactcattggttatttagttggttgttcccgttgttctctagccagtctggtcttccggttatgatgtcggtaacacaatggttgtaggttactttcatctaagcgacgtgaccagtcgtctttgatttcaataacgtggtcgaccacatcggctttacggatcaccccatcttgataacattgaacgcataccggattgctttcaagaaaccgccgtgacaacttgcgccacgctgacgacttgtagaactgttgatacttgctctcgtcagaatcatacatgcgtttgtgataccgccacttgttagtcgccttgtggtgcttctcacagtagcgtgtatcataggcaactagcgtccgacaacccgggtgctcgcattgcttcattggcttagccatgaccgttgaccttggttagtgtgaccacgtcataagcattcatctcgctatcagaactgacaccagcaacgcgatacgtaaccccatctagtattgcttccaaggtcgttgtgatccgatcgtcatggcgcaccacaattagctggttagttgtcgcagtcgtaccagtaaggctaatcgtgttactgatggtcaacgtatactcaccacgccagacagtgaacagtggcacgaattgttgcttggttgtgccgtttattggattttcaactgacttgacggtgccaaactgtacccgcttatttagtcgacttagattatagttcttcatcgtcatcaccagtcctataaaccaatgcttcacaatagatcacttttgaatcgctcaccttaataaaatcaaattctacatctaacagttcgtcatcaatatcttgtgctttgtcgacttccgaaacttgcgcaaataactcctccatattgtcagcatgtaccatcttaattttcattatttaagctccttttattctctaaaatattgcttcttaactacatcaacaacataatgacttgctaacaggtcatagtaatagtagttatatgtttccttgctcataatcattactagtgaagactggccgggataataccaatctactttgctatcaaatatcacgcccactaaatcaagcgacaagacgtgctccgctattttgctatgaacgctatcggccggcccataatcatgagcaattgcaacaattcgtgtagttccacttaccttttgcaattcggcatgatccaaccaatctccaaggtaaggtggtgtgtcatacttattacccgcattgtatgaacgatcacctgctagtagtttttcaagactatgtgggcgttcatacacggcacatttatcaaacttaaatacgtcttcaaattttttgagattttctgaactgctatattttgtgtctctcaataattgcatttcttgccatttcatacgtgtttcctcctagaactggaaatgttttttttaacgtggtccacgtggtccggtggtccaaacgttgatatatcagcacttcaaagacaccctgacgtggtccattaggtggtccaacgtggtccacttggtaaatttctgattaaacttcgcgcatatacccatgtagacgttggccattcattctaattcgttgacttttccaaccgtccatattgtccattaacaacttaattcgcttagcttccgagtttgttcgcccggttaaataacgatcaactgttttatggaagacaacttccataatttcccgagttgttgtttgattgagtagtttccgtttattactaacttgatcttgtaaccacttagattgctgaccgtagtcactaacatagctttgttttaagctggtactcatttttccccaatctgtgggaacttccattgctaaaaacgcttcgatggcatctcgcatagggtcgacagcttccgcagccatctgatacgccttagcctctttcacagtggcctgatccagatatagcagttcaccattcctaaaccagcacatggcctccgccaatacttgaagcatgtaattctcgtccgggtgccatacatctagcttagccttgttgaccccacatttaattggatagaagcgccgttcaccggtcgcgtcctttaaatagtcggtttggttagtcgtgccaataaatacgcatttacgcgggtgtggcaacgcatagcggccgtaactattccgatatgtgtcggattgtgcactaataaaatttttaattctctcaacgtccgtttttttcatggcggaaagctcggcaacttcaataatccaactaccttgtaactgttgataatcgtctttctgcttccccattcctttcaacgaatcattgaatttatctgggtatagattcttaccagccgtactcttgccaagtccttggcttccctctaagatagggacaatttcaaacttaactccgggaacataggcccgggcaataagaccagttagccatttcttagtgatggtgcgggtgtagtgattatcttcggcacctaagtaatcaatgaaataacgttcagcacgtggctggccgtcccattctaccgcttcaatacgagccttaaccggattgattgtcttgcggcgtgcttctgtaactaccgcgtcggtaatgttttccttgctgaataacaagttgtaatgatcttcaatataacttctcaataacgtgtcatcactatcattccaaaaaccttttttgaacagtgagttgtctgcttgtggtgttttgacaatttgttccgagaactcgtcaaagacaactagtcctttcaacatttcgtcatgttccataattaaacggatattgtaaagagactgtgttttgatcccatcgtccgaattttttttgaaatcattctgccaatcagcgtcacgttgcattttgataacattattggccgcttctcgggtctctgctggtaaatccattgctttgcccattaatgaacccccttactctctcgttttaaaatggattgaaaaatcacattaacttccttgcttggtagtgccggatcaacgaacgaatcattgatcactgacagcatgttatagactgtcttgggatcagcaccgacgccaaacatacgaccggcaattttagttaaccaagcattgcgattaccttgggttgtcccagttaccatttcatctaacaagcgaccggtatacttcttttggcgtgtggcataggcgcgttctgacggccagttcactttttgccccgtcaacttatcaactagccattgaggagccggcttaatatcagccaacgttcggccacctaagggttcatacactttgccgttaatctcacttggtgcaatcaccgtgaagtcacttagcaagtcaattccgggccaaacgtcaattttgcgaaccttagcacccacgtatttaaaaaagtaatggacgccgccgttagccgtccgttcaatgtaagtatctttcggcaatgtcagcccttgcttaaatagttgtaccaagctagtccgaccatttttagttggctcgtgcatatcaatgtcaacaactaataaatccgataaatctagccgcaagcctaagttgtaagttgggtgcttttcgaaccatgctaagatggtgttctggtcactagttgcggcttggtagccggccacccctttaggtggctttttcgtattcttaatcagtgggtaaaccgcatagccttgttgggccagctcaatggctttatcaagcgttgcgaactctttcatttttcaacaccgcctaatcttcgggacaaatggcattgctaacttctaacatcacactagcaatattcaatagattattttcaaggttgcttgattgctggctcttaaagaaatagtcacaccaatcactatcatatttcgtaacagtcattgccattgataaattatcaatacttactttcaatgattcccacgccgtttctaatttttcagattgttccactaattcactatttgtcattttccattctccttattcgtgttaaaataagggaaagcatatttttgattatctcttagacctactactcgccaaagtaaagtaggtcttttttgtatgctttcccatgcgactgacctcacattccaaaataacgacgcgggttcttgattaacttaaccaccacgttgccaacaaacgacacaatcataaacttgattgcccataagattgctgttgctatcataaaatcacctcccttaaatttattctgcccccgcacggtacaattaaattttatgtgcttccatgaacttatcagcgtctagttggtcaatacgttttgtactgttgattgcaactactcgtaaaccctgcttaatatatttgtaaagcgtgttgtatgacttgatatttaagcagtccatagcttgcttatatgtcatataacgtggcaattctttcttcattctatttcgtctcctttaacaatactttttgtcttaccaacgagttcatcatatattatacattttgtcttgtcaatagttaaaaatactttttgtcttgtttcaatcttgttaatggcttatacttcttttagaggtgataacatatgaaaaacaggcttagaaaactacgcaaggaaaatagcctaaccttggctgaactctcagaaatgttatttaaactatcagatttaagaatatctccagatttattaagcaaatatgaacgtggcgaaagaaatcctaaaaaaagtgtgttagtaacgctatcagaaatttttaaagtgccacctctctatttaaatggaactaaagatgttcattctcttataaaagatggcgccatttcaaaaatgaagagccaaaacttgaatattggcatatcagaagacaaggggggatattcttatgaaaaaataaatgagtacctagaagactgtattgataacaacccgcttatagattatatttttagtaatgagtctgattataaatcactcaatgacaaagttaatcaagcaatatatgttgtatctgaatatgtactattaagagtagagacttatgattttagtgtttctggaatgttaacatacttgtatttagaacttgatcatgcaggaggaaaactcgttgatgataatttgaacttgacccaaaagcaaaaagacaatatggcacaagtagtcccagaatttaaaaagatccgggaaaatgctatccattccctattgaaactagccaaagataagaattttgagtttgaagaggaaaacgctgtttcactagacttttttaaaaaaatagattcgtctaagtaattgataccataaatataatcagttctacataacactgcccccgcacggtacgttatggaggaaattataaatggcaacaatcaagaagtatcaggacaaggacgggaatacccgttatcagtttcaagtttatttaggtgttgatccactaacgggaaaaaagaaaaatacccgacgccgtggattcaagacaaaaaaagaagcccagattgtattatcaagacttgaacttgatatttacaatcatgggctaccaactaaaaacgataatacaatttttaaagatatttaccagctgtggttcacacaatataaacaaacagttaaggaaagcacttgggtaacgactcaacggctgttccggcttcatattttaccaatatttagtgattaccggattgctaaaatatccattaaggattgtcaaaaagccattaaccagtggtttaatgctggcttggccaagtaccacacgctaatgaactacgttgccaaggtgcttgattacgccatcaacattgacttaatcaatgaaaatccggctaagcgtgttattgtaccagtgaataaaaacgatcgttcacgcaaaaatttagaaaattactttgacaaggctgaattacaacacttctttgagtgcctgaatgatgatgacaatacaccgcaagccagtgtattctttcgtttagcggcctttactggtatgagaaaatctgaaatgctttgcttagaatggtctgacattgattttagcaatcacactatacgggttaataaaacacaatcccgtggtgatggtgcccgtctgctagtacaagcgcctaagacagcgcgtagcaatcggacggtgtatttagattccaatacggtcaaaatattgcaacgctggcaagttgatcaaaaagaatggctactgcgtttcggattcaacattaatcagggtagccactatgtgtttgccaatgaaaataacgaaatgtttcaaccatctaagccacgtaaatggcttgaacatactctaactaaatatgacttgaagcatgtcacggttcacgcattccgccacacttatgcgacacttgcatttgaagcccatgcttccatcaagtcagtacaagaccagctagggcattcaagctatcgcacgactttagatatttacaccgcagttactgccaagcaaaaaaatgaagccaccgaaaaactggctaattaccttaatttttaatatttagactgctaaatttgacacattttagcaggtggaccacgttggaccaccatatggaccacgtcaagaggtctttaaagcgttgatatatcagcgtttggaccaccggaccacgtggaccacgttaaaaaaaacatttccagttctagcaggaaatagggttaatttaaaggtagtcagccaaaaggacagccaactaatttttttaatggcctgaacaccttgtaatagctgatatacaagcatttatgataatacgggggtcgttcccagtatacccaatcagaagtacggataaagccacgcaggtaagatcaaatttacctgcgtggctttttatgaattgtcacacccttgccagtgcaattttatcttttttcactcaaaacggtttacggacttgattaggggtttataatagatagtgtagactgtctgtgaagccttgtaaaattgtcactattttaaattcaatccaaaggagataatgttgttggtatacaaagatgtttttggtatcgatcacaatgattgtcacattgttcagacgcggcacgagtttaaccggatcttcattatcgaaaatgaagttggctctcgctttacttgcatcaaagatgatgccccactcgaaaagaagatgtctgggcactggaagtatgcaaaagctagcgacgcccctaagaactatgccgttccttataaggcccagaaaaactaaacaaccgttgaaaagaggattacgatgcggcgctatcaaccgttaaccaaatcaaatggccgggttccccactcgctcaatcataacaccaacccctactatggtcagcatggtgctgattgggtcaaagacacgaatgcttcgctatttaatgcccaacatgagcatctccaatcaaagagccatgttgagcgacgcgtgcggcacaacgtccgtcaagtgctgtgggtggtcgtggtgattcttgccatgttacttggtggttttatcttgttctcattagcgatcaatatttaacactaaaaagagtcattcagcttatacaagttgaatgactcttttttactagcctttaatttccttggtatccactaaaactttgctgaccatccgaagctcatcagttaattcagaggttcgaatccggccaaattcgtcgaggaacttgccaaggcgttcttcgttaactttttcaatgacccgtgctaacttctcacctttggcggttaacgttagataacggtaccgacgatcataaggatcgatgttcaacacaatcaagtcattgttgatcaagtaggtcagtttccttgaaatcgctgaagaagagacgtggcagtcagcggctagctctttcaccgtaatccggtgatcagtgctatggtcaagatagtagagaatcaagaactgttcgaacgacacgtccgcatcagtcaccatcgtttgaataatctcgcgaagatggctttcaagccatgacatgcccactaagactttttcgaacaattccgcatcgtcgtacttggccttcttagtattagtcttcatcattatttaaaaccccattcatgcgtcacgttcaaggcatcatcaacaaccccgtgattacgcacggacttctgcagctggcataacggtgatttcaagatcacgtgtcatttgtttctcaatcgcagtctgaacatcacgatccgttacaactaagctcgacaacttactctttccgttgataatatcttggacgtgttgattatccaaatcatcagcagagacgattggtaagagatggaaattatcattcgttgcttgtaagcattggtcgaacaatggggcgttaactcccataaccaacacactgttttgttgttgtaagactgatgccaaccaccagttcaataattgtgcttcagaatggaagacattcgtgatggcttcttccttgttcactaattgaattgataattcgtggttactaccatattgcttgaccattgctaaagagtggtctggacgatagaagttttctagtgtcacttgtgagttattcgtccggtcaaggtactgagtgactgacaagaacccggcagcatcgtacacatcccgacgagttgctaatgacccattgaagtaagtcatgtaccaaatggcaccattcttacggtacttcaatgtcataattgggttaccgccgtcatcggcaattgacacaatctgcttatcagcattgcgcttatattgccatgcaggattatcaggtaattctggtttagtcttcgcaacggcacccggtacctttgcctgaatcgtgtagtacatgttgtacaagccagttcgtttatcaactaagccagctgattggtaactgttccaaatttctggcaagctgtcattatagttaaccgtaataacattagctttatccttaacttcactcttcaataagcccatgatcatttccatcgaagccttttcatcaccagacaatgattgaatcagatcggtgctgaacaagaagtactttgcagactggtcaaattcgacgggcgatactaagtgagtcgtcccgtaatccgattttaacttggcatcaatgctttcaatcttttgttggagccccttaacaatcgtggcattttgatcataatcatgttgtaatcgattgattttctgattaatcaagttgagtgaacgttcttgttcgtcttgagcactcttcttcttacgatcataagcaactaacgcatcttgagcggtatgtaagtctttttccgcactcgtaatcgcgtgttccttccgcgaacgttcacgggtttcagtctgttcacgcttctggagtttcacgagttcactgttgattgcgtcactcttttgatacagatcctgtgcttgcttctcctgttgcttcatcaacacgaataacttcttaagatcctgttcgccctgaattgctttacgcatatcagcttcattttgcttcaaatcagctaatgattgttcagactgcgtaatcttcttttccaacgatttgatggtttgatcgctcttagcaagagctttcttagcatcatcataacgtttttgagcagcattgatggtcttgaccattccctgccgttcgctatcgttcgtgttaacgactttgtcctgtttagacagagtaaccttagcgtcctttaactgttgttctaagtttaactgttcggcaactaaagtttcatactgttgcttttcgtgcttacgatcctgaactaattggaccttaagctccccacgtaaagtttggtattgcttgtttaagtcagccatttcgcgttcaatggccacactgtttttggctgctgtttgggtagcacgccgttggttgacccggttttggcccttaactggggcactagttgaagcagtcacgctgctactagttggccggacaccagcagatgaccgcacattgggggtcgtactactttgagtcgcctttggttttggcttttgagcagcaacggttgaagtcgccgttgcacgctcagaatgattacggtaatcctcattcttatctctgcgctttttattgaacatcttcataatgcaactcctccataaacttgattgtttgctcaaagagtagaaaggtcatcgctgacctttctatccgttcagcaaataatcaagctattctaattattatgcttcatgcttccgacgagaaacgccaaagtatagcgctgaacccatcaataaggttgaaagacccaagacagccaaggcagtcccgttttcgtcttcatccgtttgtggtaacgtctttgcgtctgaagtcgtcgtcttagtcgtaactactggcttcaatgaggctgatgcaggaacaaccccactagtcccattgttagtagtagccgtcgtcgttggcgttacttcatcatcagaaaccgtggttgctggtgccgttgaagtcgtcgttgatgaaccgttgtttgatgaaccattaccattatcaacagtatcgtcacttggcgtcgtaacaggagcagttgtagttgtaccagtaccgccaccgttgacgttgtcaccagtgccaggtgcagtcgtaggtgcggttgtcgtcgtgccaccaccgttattaccattgtcaccggtaccaggtgcggtggtaggtgcagtcgttgagccgccgttatcattcttagcataagttaaggtgatcgtcgcgtcatcagccaccgtaccactcaaagcaccatcagctgacttgtaagtgtaaccatcgattgaaggtgttgcgaccgtgtaagtgtccccaactttgtaagttgtggtcgtcgcactcttgatcgtattaccatctgcgtcaacatagttaactgtgatcgtcttagtttgttcagttggagtagtgccaccgttcttcgtgtaaacaagggtaactgtgttaccgttgtaggcaatcgttccggcaatggcatcaccagtggcatggtcataagtgtaaccagcaatttctggttgaccaaccgtgtaagcttgaccaacgatatattcagttacgctggatgctttgatggtgttaccatcagcgtcaacataattgatcgtcaagttagctttattttcaactggtgtcgttgaatccttggtgtaagttaaggtaatcgtcttattaccatcaaccgtaccagtcaaagcggcatcagctgacttgtaagtgtaaccatcgatcgttggcgtttcaaccgtataagttgagccgttatccaaagtttgggtcgtagcggccttgatcgtgttaccatcagcatcaacgtagtttaccgtaaccgttgattgttcaactggggctgcatccttcgtataagtgaaggtaaccgtgttaccaccagaaacaaaagtcccagtttgggttgcatcacccgttaaggtataaccgtcaatcgaagcggcatttacactgtaagcaccgccaacttcagctgcagtaccatcagcaccttctgtataagtcttagaaggtaagatcgtattgccatcagcatcaacgtagttaacagtcaagtttgaagcttcggtattttgtgagtagactaacgtcaattcagtaccagcagccgtcacattaccatcagaatcagtggtgtcagcggcaactgttccagtcaaagcactggacttagtcgtatctaacgtgtaattactgaaagtagcaggtgtaacggtgtaagtattgtcaacatcgccttgaacagtcgtgtcatccgcaatcttattgccgttttcatcaacgtaatggacaacgaccgtaccagcggcaacagaagtatccattacttgggttgcatagctccaagcctcaatctgctgattggcatcagtgttgttagtattagttgataacttattaactgaggtagtccctgtaaattccaaatatgcagcccggctacccgtcgtcgcgtcgtcgttagctttgaaagtatagagaacagtgacataactatcagcatcagttagcttcgtgatgtccacagtggcagttgaagcaccagctgcgtaactgtattccttaccggattcagttgcgtattcaacggcagtccaagtgccattactgttggaaccatttggcgcaattgaaacttgaccagaagcattagcccaatcaagcgcttggctcttggttaaccggatggcaactgcgtacgtatgcccggcagtaactttgatgttcgtgccatcaacattttcctgaatgtattgtgcttggtcttgtaagttgcccggaccacccgactgagtagcactcgtcaatgttccagcgtcaactgagccagcagcagtttgattagcagcttcagaagctggtgccgttactgttggggctgtagtcgcagccgtggtcgtagcagttgtggttgccgttgctgcagcagaagctggtgttgcaactgatgccttagcagccgttgctgcaacagttgccgttgaagtcgatgtcgcatcactgcttgctggtgtagtcgcactgacagttgcagctgaagaactagccgcactcgttgttgacgtagcagctgaagaagcagtcgagctggcagcactagaaacttgttccgtggttgcgtctgagctagcagcagtatcagcagaagcattaacgttggcaaatactaaacctgcagccaaagctaacgtggttgcgccggcataaacccaacgcttgccatctttatacatttttacccgataaaccgaatcaccggtcattttttgattatcttttgacatatggaatcctccccgagcacccacgattttctgcatttatgtaaaatgatggtcgacaaatcgcttgccagcccatcatcttagtcgtgcttatcgtgtcgtgcttaataacaccataacgattttgttggcatttcagttatatttaacgaattagcccttgaatgcggcaattacgtttaagataaaactgtgtaatccaccaaagatgtcgttggaaacacttgatgtatatgatgatgtgtgtgtacctggtaaaatatgaaaatcattgaaaaaactcatgagattaatcccctttaattgttaattaattagcctttgaatgcagcaattacgttcaatacgaattggtagaaagtaccaagtggttggttgctaacgtagctggtgtgtgatgaagtatgcgtacctggtaaaaagtgtaaatctgaaaagaaactcataatgtatatcctccctcattatctaaataatatcaagacattaattaatatattaattaattagtttatcgaaatagattatcccttgatcgctttaataacgttcaagatgaagctgtgcaagccaccaaagatatcatttgaaacacttgatgtgtatgatgacgtatgcgtacctggcaatacgtggaaatcgttaaagaaactcataatataaatcctcctaaaagattagttttgattacttgctgaataagctcttgattgcaggaatcaagtttaagataaagctatggaaaccaccgaagatgtcgtttgaaacacttgatgtgtatgatgacgtatgcgtacctggtaatacgtggaaatcgttaaagaaactcataatgtaaatcctcctataattgtttgactaaattactttttgaatgcagcgatcaagttcaagacgaagctgtggaagccaccaaagatatcgtttgaaacacttgatgtgtatgatgacgtatgtgtacctggtaatacgtggaaatcgttaaagaaactcataatgtaaatcctcctatgattgtttgactaaattactttttgaatgcagcaatcaagttcaagacgaagctgtggaaaccaccgaagatatcgtttgaaacacttgatgtgtatgatgacgtatgcgtacctggtaatacgtggaaatcgttaaagaaactcatgttgaaatcctcctataaaattaactatgattatttgctgaacaaactcttgattgcaggaatcaagtttaagatgaagctgtggaagccaccgaagatgtcatttgaaacacttgatgtgtatgatgacgtgtgggttcccggtaagaagtgcaaatcagtaaagaaactcatgaataactcctccttttaagttagttaatggttaaatccccaagcctagccacttgtatggcaagacttgagagtttggaaaacaaattaaattccgacaaacttgattaaacggttagaaaattcaactaattaatcattgaattccctaacacccgtctctagcaacgcttaacctttgattgcggcaatcacgttcaacacaaactgatagaaagtaccaagtggttggttgctgacataactagtatgtgatgatgtgtgggtccctggtaagagatgtaaatcactgaagaaactcatgttaatatcctccttagaaaatttacaaattgttcacaaattagcagctcaataatcattaatttaatttagtctgttaaataactaatattgattactaatgcgaacgtgaaacaagtaacctcgtttacgatttaaatattaactaattcgccccacaatcgtcaataaaattactaatatttgaataaatacagggcagtatcatattcaatcagtaaatgtgtatactatggacaacttacgcgtttcattaacggtcaaaatttgtgtccaatatcaatattatttatatttatcaccagttaactatgccagtagaaagcgtttaagcccctgataatatcagcatttcagcgtagttacttggtgcgacatcccctctttttttccgaattatgaaccataccatcgggaaatttattccctaaaaaataattataaatatcgcttttttcgacttattattaaaattattaatactttttatattttttacggcggttttatttcacgccgtgaccatcattatccatttaaatacatattttcggatcaaaaaagtggctattgccaacactcagcaataaccacttactaattttaataatcaaacaatatttcactaaggccttttttaaccgtgttgatactgcagccgataaaagtcacgataacgttcatgggttgctaataaggactcatgattgccatcacccgtaatctgaccatcctccatgaagagaattcgcggataagcttcgatctggtttaaccgatggacaatcgtaatagtcgtcaggtcagctggtaacgtcgccaagagctgggtcacccgttcttggttctgattatcaagactagccgtcgcttcgtctaaaatcaataacgacgggtggcggacgagtgcccggacgatggccaaacgttgccgctgcccaccagaaacattcaagccccgttcaccgacgtccgtatcaagaccagctgacagttcagctagccagtccgctaagccgacttgtgtcaacaacgcactcaattgttcatcagggaccggttccgtcgaacctaacaggagattatcgcgaatcgtcccgggcatcaagtctacttcttggctcacgtagccgatctgattacgaatcgagggaatcgtataactggccattgtctcgccgttcacgtccagctcaccacgagttggcgtatagtaagcctctaagagcgaaactaaggtcgttttcccgctaccactctcaccaatcaaggcaatccgctcaccgcgatgaattgtcaaatcaatgtccttaagcaccggtttatcactttcgtagccaaaatcgacgtgatcaaagtcgaccgtatcgatttttgacagcgtttcgcctgacaaccgcttatcttcttccggactatctaaaatgttgtcgattcgctcagttgccccgaccgtttgttgcaaggcagtcactaagccagttacgctactcagtggtgaaatcatttgaacagcatacattaagaaagctactaaacttccaattgtcaacgcgttcgtttgtaccaagatcccaccataaacaatgataatgaaaattgcggccagtaacatgatgtttagcactggattaagcaccgagatcagcttgatttgacggacactgaagcctttgatccgatcaacttgatcttttccctgttgtttcagtgccttttcagcaaccattgctttcactaaccgattttgaccaatcatttgtactgctgcactatttaagttggccgtttctttttgaatcgctttggagatccgcgctaacacttgacccattggcacaatgatcacggccatcaatggaaccacaattaaaataataatcgttaagcggaagtttaataacaacattaacgtcaaggaacccacaattgagatgatcccattaatggcattcgaaaactgacttgaaatcaattcaaaaatcgtcgatgtatcgttaactacccgactagacagttcccccgtccggttatggtcaaaatatggaatcggcaagtccacgatatgttgccataacgcgctccgcaacgtcgaaacggcgtcgacccccgtataactaagtagaaaactcgacgcaacacttgcaaatagctgcacgacaatcacagcgcctaaccgaagcaacagttgacccgaagtaccatggttaaaggcgtcgataaactccttcaacatcaacgtaatgccaagactacaaatcgttgcgacaaacgacaacaggattccaatcacaaagagtcccttcttcgggtgagcatgggtcatgatcaatctcaataaatcacgggtcccatacttggcatgtggttgtttagccgatgacgtgatatgcgtttccattggttgtaactcccctcattgcttgaatatcaggctgaatgacatgatcattccaacgttgccaaatcatagcctcagaaaaacggctactgttgccatatgcccgttcactcatcttcgccaactgtttagggtgttgtaagagcgttaaaatcaccttgcccaattcaactaaattattgggggtgatcaatcgcccattttcaccatccgtaatcatcgttgccggaccatacttaatgtcataggcaaccaccggaacgccatgacttaacccttccaaaatacctaagttaaagccctcatattggctagtaaggaccatcagttgtgcttggttatagaccggtgtcaaatcgcgctcaaagcccttaaacgtgataaatgactgccaacgttgcgaactgaccaaggctcgcaaccgattttcttctttaaatccagtccatgaatcaccataaccataaatatctaaggtcacattcgactgtttttcatgaacataggcgaccgccttaatcaattgttccaaatttttctctgccgataagcgagcaacggcaatcaccttgccctcaatccgatccttaaagtcaaccggacgagctgctaattgttcgtcacttacactaccaactggaatcgctaaagttggaatcacattatgaatgtggttcgtcatatcatcacactcttcttgcgtggacatgatcaaaccagccatttgactggcgtgatctaacccgatttgagtgtacggcacaattggtgagttcacaacgtcaagtgggtccagcgtgaaattactgtgtaagaactcatacttgcgcgctgctgtggacattttaacaatcggattcatcccagcatcactacgatccacgatcatggttccgtgaccgccatactcagtatttaacgcgtctaagaaaaaggcagtcagctgatcccagtcctcaaattcgtaattatgcccgtgatagtttaacagccgttgatgagtggcaactggttgttgcttctcatttggccggaaaaacgtctctaagacaggctgttgttgtaaattacagtgttgctctaacacaatattctgcttgtcatcaaagtactgggccaccgttaagaagccccgcgtatcataatagtctcgacggctgaccgcgccctgtggattgagaatatcgacgtaatcaatattcccctgcgcatttaacatcagtgctttttgccgttgttcccgttgaatgacgtcaaattcattagcgctgacccgttccagcgtttcacccgtcacccgtggataattggccgcagttaacggttcgccttcgtaattcgtagtgccttgaaaataatcatacatattgacctggaactcatcatcatacccaatgagttgcatattatgatgtaaatcgcgtacaaagttacgggtcacgatcaacgcaggtacccggtgctttgtgaataatttttgacgctgaatcatggctaactcaatagctgatggcgtcgaatcaattttgctcgtaataaagaaatacatttgctacgcccccgcttttattcatgtgataaactctcgactggatccaaccgtgccgccatatgtgccggtgccaaagcagccaataaactgatgacaacactgactgtaatgccgcccagcattgctgccccggagattcgaacgattggatacttaattaagctatagatggccatattgcctaagaattgccaaccttctccaaacagtaaccccataacggcggctaataccccgatagttaaggcctcagcaaagaacaaatgactaatatcgcgtttgcgggcgccaagtgcgcgcaaaaccccaatttcacgagtccgttcagaaacgctgacgtacaggacaacaatgatcataattgctgagactaataacgcaataccagccaccccggtcaatacgttagtggctaaacgaatataggtattcaatgaatcaattaaatcaccgattccggtatagttatactgttgcttcttattcgttcccttgattgccttgatttggtgttcgacttgcttaacattcgccaatttatctatttgaacaatggcaaaatttggtcgataagccacattcttagcagttaacatctttttgacggtttgtggtaagaccacgacgctagtatcatcgctacccgtaattccgctgacggtcagcgtctgactgaccgttacggactgattcttgcgattaaccgttgccaatttaacggtcaacttcttattgagcgcttgttgataatttttcttacccaccatcttcttagctaacttacgaccaatcaaaacttgaccattttcaggacgtgaaccgtccttaattgtcttactcaaaattgtggggttatccgtctggagactggccgtcacggttgtttttttataactcgcttgtgtgctcgtgtaatagcccagcttagcagacttaacatgtttgatagccgctaattgtttgacgtttgcagtcgtcacttcggcattcttcgcggctgtgacttgttcttggttaaccgctgctttgtaagctgctgcactggttgcttttttacgcgcagccgtgctgactttccccgtcttctttgatacttggacagcggttggattaacttgagacgtaatctggtgattcatataattttgaatccctgatcccaagcccagcattacgacgatactactgatcccgatcgacgatccaaagataatcagcaggtaacgaagccacattcgacgcatatgttgcatggacatccggaacatctgccgaaagccaagtgttcggtaacgcgtcggttgcttatcgaccacgtcgaaaggcgccccgatcactaattcgtcatgaatctggccgtcatccaaatgaacgatccgcgtcccgtagtcagccacttcctgcgaatgggtcacggtgatcacaagtttaccttccgcagcgattgagtataaaatatccattacttcttgggtattttcactatccaacgccccggtcagctcatctgcgataataatatcggggtcactggctagtgcgcgagcgatggcgacccgttgcttttgaccaccggatagttcatttggatactggtgcgtctgttgctcaagtcccacccgcttgagtaggtcctgtgcttgctggacttgttgcgcatgggacgtcttagtcatctttaatgaaagcatgacgttatccaagacagttaggtaacttaccaagttaaagttctgaaagataaacccgattgtctcccgacgataccggtccatttgccgcacattcattgaacgcaaggattggccgtctaacaagacatctccatcataatgatgatccaagccaccaataatattcattaacgttgacttaccaccaccagactccccaagaatggaaataaactccccccgttcgaagtttagattaatgcccttcaagatgacattctcttggtgatttaaggtataggccttacgaatatcgtgtaattctaaaaagctcatatatgtacctccactattttattaactacattccccacaatgtatttcctcattaataacattgcgatttttggtgaatgatgtaaagtgttattgaatacctgtggtcatcattcataattaaaattataatcatcctaaatcctaataaaccacctacttggtagttacaatttgtaaaatatcacccattttgctgatttttacaataaaattttttctatttcgaacttattttatgacggcaatcacgacttaaccgtcagcagagataaatccaagcaccccacacattcaaggcatgaactaaaaagcgtccattactaggcacactgactgccagtaacggacgcttcatcgtattaaattacacctaatgactccaacttcaatcagcaggattcctacttaaaaaaggaccgcttcgtgaccacgcggtaaatcgcatccgctaaaccagtcacaaatacgacaatcagccctgcaaattgcaaccatggcaattgttgcctgattactgtcacttcactccccagccaaaagactagtaacccgagaacaataatgatactttcgataatgtttaatttacgcatctcaaactcctcacgtacatcacacatcgttgcgagcaactaccatgcatgactatatttgtcctttaacacctaatctattataacccgtctgctgttaaatcacatgccaaccactcacgattaaactcgagataggtcggcagatttttcattgcgtgatgtcattcaaagttagtgcgaccagtgcggtcaaaaattacgagcgtcaccatgttaaattagggtcatcttgcggacgtagcgattcatttcgccaacaacgttgtgattcataaattttagattagcgacgacgctcaataacagctacgaacacagcgtcagaaagacaagcaaaaagcccccaaaacaagcagcctatcagccagctgatagttgtttgttttaggagcttccatcttaatttctaaagtgctagcaccttagtcactaagacgtgcggttaacttcttagttaattcttcgtaaccaggcttgccaagtaaggcgaacatgttgttcttgtaagcttcaacaccaggttggttgaatgggttgatcccgttcaagtaaccagaaatggcaactgcagcttcaaagaagtacatcgtgtaacctaacgtataggcatcctgtgaaggaatgttaacgaccatgttaggaacaccgccatcaacgtgggccataataaccccttcgaaagctttggtgttaacttgagccatcgtcttgccttcaagatacttcaacccatcaaggttttcggtttccttaggaatgtcaacatcactagtagcgttgtcaactttaacgaccgtttccatcaagttacgacggccttcttggatatattgacccaatgagtgtaagtcagtcgtaaagttagctgatgatgggtagatccccttttggtctttcccttcagattcacccattaattgcttccaccattctgagaacatcgccatgtttggttcgtagttttcaagaatttcagtggtgtagcccttccggtacaagatgttccggtaagcagcgtattggtaagcttcgttcttagataaatcggcatctttgtattcattttgggcatccgcagcacccttcattaatgaatcgatgtcgccgcctgataccgcaattggtaacaaaccaactggtgtcaaaacagtgaaacgaccaccaacatcatcaggaataacaaaggtttcgtagccttcagcgtcagcttcttgcttcaacgcaccgcgcttgcggtcagttgtggcatagatccggcccttagcagcttcttcaccatacttcgcgattaaacgttccttgaagacccggaatgcaattgaaggttccgtcgtagtccctgacttcgaaatgatgttaacagagaagtcacggtcgccgattaagtgaattaagtcgttgacgtatgaagatgagattgagttcccagcaaagacaacttgtgggaatttacggtcttcacgtgaaagtgatgaccagaaagtttcgtgtaagaattcaatggctgcccgtgcaccgaggtatgaaccaccaatcccgattacaacgaggacgtctgaatcgtcttgaatcttctttgcagcggttttaatccgtgcaaattcttccttatcgtaatctgttggtaaatttaaccagccacggaaatcattaccggcgccggttccttcacgcagctccttatcagcagctgtgaccatagcttgcatttcgccaagttcgttattatggacgaacttagttaaattagagctgtcaaatgaaatgtgtgccatttactattacctctttctatacgtatttacatgtcatattatacaatagctcgcctaataatgaaaagcgcttcctcccttttttcgtaaattttcgtcatttgtgtaaaaaataaatacaattattaacaaaaaaggtgctgataacttaccgttaccgcaccttcaacagatttttttaatctgtaaatcaaataattaattttttagtaaagctttactaagccttcattaaggataacgcgaccccaccaacaatgaccaggatcgagccaatcaccacgtaaaccatttctcgcttcgtcttgtgctctcctaagaggtagatactcccaaacgtcgaaataacaattcccatttgcgaaagggagtatgcgacagcttgtccgatttgggccattgccataaacatgaagagattcccaataccccagaccagaccagtgacgatattacgataagttgctttaacaacccatggcttatccttaaaggaccagatcaaagcacccagcaacatcccaacagcttgaggcattacaactgcctgtgcattgacgttaccataatggaccacaatcgtatagccagcgtatccaatcgttgataagatcaaggcacgaatcccaacaccccaattttcagaagcactacggttcggatcagtcttatcagttaaggaagttaaaacagccccggcaatcaacacaattacagaagcggagccaatccaatacatgtttccgtgccattcattgaataacagcacaccggccaacgcattagcaaccagttgcatcccagttgaaatcggcgtagtccgtgaaataccaaccgccttcattgacgtaaattgttgaccttgaccaatactccagaataacccagagacaatcccaatcaaccaaattttgcttgttaaagttggctgttctacggcccagagtgccaagccaaataccaaggctcccatggtcatcccaagggtctgttgccgagcggtaccgcccattcggccactaattaagccgatactgccccacgcaatcgcaggaatcagtgcaattagaattcccattactaataatcctcatttctatgttttctctcttgcctaacgacaaggaattattttaccagttaagtaaccgttttaccagtcacaatcagggattcagggttaaatataattattttctatattttcatgaattcgttttcttagcgatagggaccgttttcaattaatgaaaacggtccccgaaataccctttaaaatttttttctattccacttaaattatggcgcacacactacttatcgagtgtcaaaaccagaaccttcaaatagttgcttgccaagtaagccttgcgcgtcacgaagtctgctggtaaccggaacgtctcactaagtgtgaagtgccgatcactgcccacaaaggccgccgtgaccgcggctttaaacttcttcattgaaaaattattcgcagtcgttgcaatcactaattgcccatcacgccgaacaactggtaaggtcgctgtcaataagtcagttaaatcagttgcaacttggaacttctgctttttcacccgcgcaaaagtcggtgccgttacgacaacaacgtcataacttagtcggtgcttctgggcgtaatctagatagctgttcacttcgattgctcgaatttcctgcttatcagggtcaatattattgaccgccaattgatcagcggtctctttggcacccttcttacttgtttcaatggaaatcgtcttggcagcacccgcaacggcagcagcagccgtaaccccattttcctggctaaacaagttcaagaccgtcttaccttgcaattcggctccggccaaccattcccggatgggacgcatatctaatagtaacccggtcgttaaatcatcagcaaggtgtaatggatacgtcaccgcgccttcagtcactaataacggctctggtgctgcttcacccgtgacgagttgactctttaagttagcttcttcgacattaaatcgtaatttcgcatagatgcctttaaattgatgttcagtagccgcttcaaaagccgcatagatcatttcgcgttgctggtaaacaccttgtgcgtaccatgtaaagacatagtaatcttgataacgatcgattgctaacccgccgagaccgtcgccatccgcattgaagacccgttgtggtaactgtggatccatgctcgttgctcgccggaccaacgcctgtttgaataacttacgaaagtaatcggtcgttggcgtctcactttcatccaagctcaagacccagcctagttgccgacgatgcttcgcaatcagcgcgtagcccataaattgagaacttgccattaacgccacaaaagagccatcggttagtttcatactcggatccttgagatcatcttgtacgagtaaaggatagccgtccttgactttacgttgcgaatttcccgtaatttgtactctttgcatagttgttgtttctcctattcatttcaaatcttatctaaactattgataaatcgctgtttgcagccttgttaagggtaacatatttagcctcagagtgcgaggtagaacagtgtcaatcgctgaaaagtattaggcttaaggtccgcaatcgattactattaaacgtccgttcctactattaatgatgggttattgctatggcccaccgttaccccgcattagcaaaaccgggcctcgagatcattacgatccccaagcccggtccgtacggatttacccgctttaaactatcacgttaatcatcaataatcggtttatcaaaaccttcatctgggaaagtaacggtaaagcacgtcccttcgttctccacactgtcaaccttgatcgaaccaccatgttgttggactaattgatgtgaaattgctagccctaaacctgattcaccatacttcgtattctttcgtgatgggtcagccttataataccgttcccaaatatttttgacttggtccggtgtcatcccaatcccatggtcttgaatcgcgacaaccgtcgcatgatccgtacggctacccgttacttcgatcacgttagcttgtgaaaactgaatggcattctgcatgatgttaaacaagacctgaacaaagcgatcataatcggcccatactggcagtttctcgggaaccgtcagcttaaattcatcatccgcggcggccgctttctttgtgagctgttcaactaagttatgcaaaacctcggcgccatcaaaattggtcttgttcaaagcaatctgtccggttcgaattttttcgtaatccaagttctcattgactagtcgaatcaaccgtttcgtctcattttgcatcagttcaattgaatgacccttgtcttcttctggaatagcatcgtacgctaacccttccaaaataccattgatcgtagtcaacggcgttcgcatttcgtgggccgcatcggccataaactcccgacgccgcttttcctgtcgcttaatttcttcattggaagttcgcagggagttgaccatgccgttgaaatcatccgccaagtcatcaatctcatccttatgattactgtcaacttgaatgtcaaaatcaccatttgcgaccgagtgcgtcgcgtaccgcaatcgattaatacgacgaacggaataacgtgccaaaatgtaacttaacaacagagccgcaatccccgagactaacagtgcaatgaacagatttttttcgatctgctgttcattggcctgcaaggtctgttcaaacgacccaatcgagatggccccaacaaacttcttcgttgctccattcttatagaaaaggggcactaaaacgtcaatggttcgcaacgacggtgtattcacgggttgatcacgattgcgtgttctgaacgttacgtggggcgactgcgtaataatcttattccgcttcagcttcttccaatctttggctgagatcttgggatcataaatcgagccaccaggggtcccactcattgttgtccccataccacttggatagaccaactttttgttagcatcatataccgaaaagtgaatatgttgatctcgtaagatgacggtcccatcatttagaaattgttgattaaacccgacaacttgattagtcttcgtattataccgaatagcttccttttcaatactcgcggcgtactgctgcaattgttgccatgagttttgataaagcatcgttctagtcgttcgaataaatgaaaatccgaggacgacgattaccgtaataatgacggcaaagaacgctagcatttgttgataaatcagtttcattgagcgtcaactccactatcatcaaacttgtagccgaccccccaaaccgtctgaataatttgtggcccagctttttcaatcttttggcgcaattttttgatatgtgcatccacagtacgttcgtcaccataatattcataatcccagaccagttgcaaaagttgttcgcgtgagaaaacttgccgcggcttttgagctaaggtcttcaataaatcaaattctttgggggtcaagtcttgaatttgtttgtctgctaaataggcttcccgcgtcttggtattcagtttaaaatggtccgtctgaacatcaaaggaactcaccgtgctggcaggttggtcagccggcgtggtcttagccaaatctgctcggcgatgaagggccttgatccgagcaatcagtgtaatcggtgaaaacggcttggtgacataatcatcagcgcccatctctaagccaagtacctgatcactttccgaatcacgggccgtcaacataataattggtacagttggggaagccttgcgaatatccgcactaacttgcatgccatccttgcctggcaagttcaagtcgagcgtcaccatatcccagccatcgacatcttcattgaacatttcgacagcttcattgccatcataagcaaaatgggcatcccacttttccttcttaaaaaacatggccatcatttcagagaccgatttattatcttcaatcattaataatttcatagtgcaacgtcctccaagttaattacgattgctaactttgttgattaatcatcatttattaacctatctattatcataccctacttcgcgctaggattcaggatgacaattgttgaattgttagttttttattaattttaggagtgggtcattattctagaacaattatttcatttgcgtgaaaaccgcacttcagtccgccgcgagttgattggtggtctgacgacctttttagccatgtcatatattttagccgtaaatcccgaactattgggaagtactggtatgagtaagaccgccgtcttcaccgcaacgattttagcggccattgttggttgtctcttgatggggctagttgccaactttcccgtagcattagcaccggggatggggctgaatgccttctttacttatacagttgtccaggaatggcacattccttggcaaaccgctttggcgggagtctttgttgccggaattcttttcatcctactaacgctctccaagttacgcgataaactgatcaacttgattccaagtgcgctaaaatacgccgtatctgccggaattggcttgttcattgctttttcaggactacaaacctctgggattatcgttgcgaataagtccaacgcggtcgccctgggtaacttgcacagtcccaccgttttgttggcgattttcgggattatcgtcggcatcatgctagtcaccgctaatgtaactggtggtattttctggggcatgttcatcaccgccgcagtcggaatgatcttcggtattattcccctaccaactgggattatcagtggggttccgagcgttcaaccgatttttggtcaagctgtgacacaccttggtaatattaattcgtttcaaatgatcattgtcatcctgacgttcttcatcattggccttttcgatacgtcgggaaccttggttggggtggcaaccgaagccggcatggtggacaaagaatccggcgaagtcaaaggcgttggtaaagcgctctttagtggtgcactcgccacaactttaggagcagtctttggcacgtcaccgacgacggcttatgttgaatcgacttccggcgttgccgtgggggcccgtactgggttatcttccgtcttcgttgccctcttgtttgccatcgccgcctttttctctccaattttgacggtgattacgtccgcggtgaccgcttcagccctgattatcgttggtattttaatgttatcaaacgttcaatatattgattggaccaagtttgaaatcgccgtcccagcctttttcaccatgattatgatgctactaacttacagtatctcagaaggtttggccgttggctttatcttctacccaatcaccatgacggtcaaaggccgttggcgtgaagtaaacgccctcatgtggacgatgatggtcgtcttcattctctactttgcatttgtcgcttagaactgatggttagctaagcaatgatggcagtctaaaacacccctgagtcgtttaactcaggggtgttttttagtaggcacggctgcatctaacgcctactagtgtttaagaacttgttgattatggtaatcttcagcgtagacttgggcaaagtcagcaagtttaacatcgcctaatcgaggttgatgtgctcgataatccgcgtaaaaatcgtggtcacgctggtaagcgaccgttttaacatattcccgtgcaaatgcgaccggggttccggcagtcactaaatgatcttgcatgacctcatcaggcacttgtgaaacgcgcaaatccggcattttaagagcctgtgacagtacggaagcaacttccaaataagttttctcatcactcgcaacatatgtcaccgtttgccccggtgtcggttcggtcagcgccttaatcagtacagttgtaacgtcgaccggcgcaacccacacgttcttaacagccaaattggcatttgtgtagattcgatgactctttttaacggttggcacactgctcagtaaattatagtacattgccgttgggcggataaacgttaagtccacgtctggtaaagcggttgttaacgtttgttcgataatatgatacatgtaaagtgcaccgacttctgatcccaagtcggcccccacgctactcagattcaccactcgttttacgccggctgccttgatcgcagcggcatagatgtccgcttgtcgtttggcagcggtataaagatcatcactcgccgctataccagttaccatgaggtataccacgtcagcgcccatgaacgtcttggtcaaaaacgcttcgtcatcaagtcgaccaatggcaggggttgcgcgaaaaacctttatcaaactactgcgaattgcttgatgactgatgaccgtcacttcatgaccagcatgggtcagcttaggtaccaaggtctggttaatacgaccgattgaacccgttaaaacaattttcattttatgataaccctcttctatacttattaaaatatccgtcaaagtcattatcgattataagcgaccactaaaaccccgtcaatcactggtggtttagttggctaaacagtgttgatgtgcggttgcgcgattcgttcataagacaggactgattaacgctaatcaaaaattatttctatttatcaagagataatttttgttgaaactgtgcaaaattaggcctataatgtcaaaatgtttgacactgtcaactacgacggttagtcgcctttcctgttaccataagtttttcttacggagattatattagatgagtctagcacaattagaaataggattactgtggttgacaggctcaattgcggtcatcttcatcctgacgattggtacttactattggtactcccgcaaacgttccaacaattaccttgaaaatgatgattttaatctacgctactttattcaaaaacaagtcgattttcgtggccgcactaccggctatgaatgtctcctgcgtcaacaaaatactgatggttcgtggtcattaccaccacaacttgactcacttccacttcagcgggtgatcttcctgcttgaagatacctttaaggcgctacctgatgaagcgattacgttatcaatcaatttagaatacgaacaaatcatcagtcccgaattccgttattttgttcgctgggcaattgcgaacatcgaaccgatgcacttggcaattgagtacacacctcaataccaaccacgtcgtatcaataaacgcctatttcggcggcgaattcgtgaagcccgcggttacggcatgcagtttggaatcgataacgtcggtgcaagtctagccaatcttaaaaacattcagtggcttttaaaagatatcgacacgctcaaatgctcaatgcgctcatttcgcaaggaagacccatccgtctggctggacctgaacctccaattctggaatcagctctctaaggaaaacaatattgatctaattctaatgggaatcgaaaatgaggccgatgaacagctcgccgagcaactgcaaatcagcattcgccaaggctacttattcggccatccaatcaatccccagcaatcaaccacaaaggagaaccacgatgcctaaaccaaccactgatgatgttaatcggcaacaactatactctgatgcgtactttgacactggccattggggactcaagattcgccaaacgatcgttggtatcgtgggttggctcgcagtgattgtgcccatcaccgtgacagtcctttccatttggtcaagttataatccacacattccgcgtttctggcactaccatgaaggtcttttcgaatttaagttcatcggtatcttactagccttttgctttgcactcgcatccctttttgcagtgaccatgaccattatacagaatcgtaagcgtgaacgtgtcgttgaacagtggccaacctttaatcccattaatcagaaaaaacggcagcaactgctcgctcagttcatggcggaccgtttcggcaatgccgaatttcgtgaacatacccgccactaccgggtcaagccagaacaaaatctcgatactaatcagattcagcaactttatcaacaaaataatttagacgatattaacgattaaccagggggcgccatgacaaatatttttattgaccacatattcgccgcaaccttatttaaatcggtaatcaacatcgcactcctgattttatgcctctaccccatcgttggctcttttttctggttcgccggcgcgctatcctaccgctttatcaagaccaataagcgtgatgatgactggcagtacattccggctgaacagcaaccaatgattaccatcatgatcccggcgcacaacgaagaagtcatgattgaagaaaccatcacatacttatttacccagctcaattatacgaactacgaggtcctagtcatgaacgatggttcgaccgacaagacggccgccattattcaacggttgcagtccgtctatccacggctacgaaccgttgaaattgaggaaaacaagggcaaggcccacgccttcaatattggcatgtactttgcccagggtgagtatattctcagcaacgacgctgatacgattccagaaaaggacgccctgatgaagtatatgaatttcttcatccatgaccgcgatatgaatacatccgccgtcaccgccaatatggatgttcaaaatcgaacgtcgcttttaggtaaatctcaaaccgttgaattctctagtatcgtcggtgttatcaagcggagtcaaacttccatcaacgactctatgtacgcgtatagcggggcaaataccctctaccgcaaacaatttctaattgacgttggtggctttcgacaaaatcgcgcgacggaagatatcagtattgcctgggatcaccaaatggtgggcgccgtcccgcggtttgcccctaacatcgtcttccatatgaacgtccccaccacaatccgagacctttatcatcaacgcaaacgttgggcacagggtggcacggaagtgtggttaacgaacattaagaaattcattttccacccaatcgttcatcgctatcaactatcaatgttcgtcgattcgacgttgtcaatcatctggtcctttttcttcgtcatcacttccttgatgtttttgattctgatgggttacttcctgataaccggcaattttgaacgagtctaccacggcttgatgttgtcatttgtctttgttagttttgaactattggccgggttcatgcaactgttagcggcactcctgttggaccatcatggtgcgaaactaaagtactggttcttcgccccactctacatgttattttactggatgatcaatcctatcaccgtcgttgcaacgtttattcctgcactcaaaaccattctgggctttggctccggaacgtgggtcagcccgaagcggcagtcattgcagggtaaaaagtaaaacggtgtcttaacactttcaataattgatgacggggctactggtgcgagaacttgcaaccagcccaaccaaaaacgtgcacttacctgagtgataactgactcaggtaagtgcacgttttaatattaatcccttttgatcgttttcttagctatgcaaacggagctgcccaggccaccctgtgactagctacgctgagtaacaggtcccatgtgtcacgtgccactcaacgcagagatcggcaggtaaatcacgaacggcctcacgacttacctgtgtgccaagttcagtaattgagcacccttgctgactgccgaggccctggcgattcagctgaatcgtccgcgcaccaactcgatacaagtcactcatgatctggtggtaggctgcggccaagtcatgcaccatttccgtatctgattgatagactcgattaagtgcgcgcgcattatcggaccgtttgagttctgccaagcacagctcgggagcgggcaaaatttgtttatccacagttccaccactgatttgattgcccatgaattcaaaatgcgcaacggcaggatggttgaagccactgattttaccggtcaacgctagcgccggcaccaaacctatcccggattgggtgatgccttgtagcccccagaaaaagttaaagtgccaccaatttagattatgcgacttatcaaccggtttccgaatatgatgcataaaagcagcgtcctccatccgtttaagtcccgccgcgttaatattcaacgttgttgtgccccgatgcaaccctttttgagaccgcattgccatttgccaaccatgtacacggtgcctaaccatcatcatcaatgtgccaaattccatgcccgtttagcctccaaattaattgcattctgccaatataaaaatcgtcccctactgcttaaaaaggacgatttcaacgtttgggtcagcctttaactgccaacaccaaccattattcttttatgacgaatttaagtaatgtttccagcatagaatggtgctcaccgaatgtcaagcgctaatcgtgggacgctgtcatccccttaacgccaatatcagttcggtacactagattaccgactctgagttggtcgatttgttgataaacagcccgctgtgctgcgaccaagctcggggcacttgcggtaaccatcatcacccggccacccgcactgactaattgatccggggtacccgcaacgctagcataatccgcaccagcaaccgtcggaaccggtacaccggcttcagttggtcccggataaccgggagcagctagtacgacgccaagataagttgccgtcgtttgccactgcgcgtgtggttgccgatgttgcagtaagtcgacgatgacttgataaaaatcactctgtagttgtggtaataagatctgcgtttcaggatcacccagtcgcaaattatattcaataacttgaacaccggtcgcagtcaggattcccccaacatagatgaccccttcaaagcttaacccatcggttttgagacctgcaatcgtcggttcaataattgtcgcaatcgtttgatcgataaccgcgggcgtgatttgcggtactggtgaataggcccccataccacccgtgttcggtccccggtcatggtcctgtaaccgtttatgatcttgggcggtcggtaataacgcatagtgctcaccaccaaccaaaaccatttgggaaaactcaaagccagcaacgtagtcctcgatcaagaccgtcgaactagttttaaaggccgtcttaatcgctgccgcggcttgttcataactcgtcgcaaccgtcacccctttaccagctgccagcccatcgactttgataacttgcggcaccgcttgttcatgactataagctagtgccgaatccaattcatgaaattgccggtagtcggccgtcggaatgtgatggcgactcatgaaggccttcgcaaataccttagaactttccaactgtgccgcaacttggttggggccaaagatagccaggccggctgcttgaaagtaatcaacaatgcccgtggctagcggtacttcgggtccgacgaaggtcagggtaaccgtattggcccgtgcaaagttgaccaaccccgcaaagtccatttcgtcaatcgctagtgtccgaataccatcccggatcatgcctggattaccgggtgcacaatagacggtactgacttgcggacttgccatcattgccttggcaatggcatgttcgcgaccaccaccaccaactactaatacgtttgccatgcacgcacccatcctttcattaatgccggaagtgtcgaacaccagtggtgaccatcgcaataccataacggtcggccatggcaatcgaatccttatcacgaatactaccacctggttgcacgattgcacgaatgccgtgctgcgcagcatattcgacgcaatcatccattgggaagaacgcatccgaagctaggatagcattttcgtagccagcttgtttcatcgccttaccaatggcaatcttagttgaatcgattcgattcatctgaccagaaccgattcccaatgtccgatctgcggtagttacaacgaccgcattgctcttaacgtgcttcacaacttgttggccgaaagcgagtgcttttagctgcgcaggtgtcggttgggttacggtaactacggtaaaatcagctggcgtttcgaaggccgcgtcgacctcctgacgtagtaagcccccaccgactgaaatcgtttcaaacttatcggccgtgtgcgtttgctcaaagtcaaccgtcatcaagcgcagattcttcttcttggccaaaatagcaaaggcatcgtcatcaaaactcggggcaataataatttccaagaagagtgcgtgcatcttctcagccgttgcgagatcgactggtcgatttaaggcaatgattcccccaaagattgaaatcgaatcggcttcataggctttgtcccaagcagcctcaatcgtcgtacccaagccaaccccacacggattcatgtgcttcattgcaactacggccggctgttgatattcactgaccatccgcaaggcagcatccgcatccttgatgttattgtaagaaagctctttcccatgaatttgcttggcacccgtaatcgagaagtgcgtcggtaaagcattttcgtaaaaggcagccttttgatggctattttcaccataacgcagggcctgcttcttatcataagtaagggtcaacttttctggaaattcttcagtcgttaaatattgggcaatcaaggcatcataggccgcagtatgttgaaaaactttggccgctaatcgttgacggagtgccggtgtgaccgcgtccgtctgcaaatcagccagaatctgctcataatcagcaggatcaacaattggcagtaccgcggcaaagttcttagctgcggaacgcagcatcgacggaccaccaatatcgatttgttcaatagcttcagcttgtgtgacgtctggttgttgaatggtcgctttgaatgggtacaggttaaccacgaccatgtcaatcggttgaataccagctgcttttagttgcgccatgtgcgctggcaggtcacgtcgtgctaatagtccggcgtgaaccttaggatggagcgttttgacccgaccgtcaagcatttcaggaaaaccggtcacttcttcgattccgatgactggaatatcagctgcttccagtgcctttttggtcccacccgttgaaatcaattcatagtcaagggcaacgaggcccttcgcaaaatcagttaatccctgtttatcagaaacacttaacaacgcacgttttgtcatcttaaattgctccttcattaatgagtgtctgtaatacatctggataaaattggtgttcacaatcatgaatccgggtcgccaggctggctagcgtatcgtctggtgcaaccggaacgacccgctgggcaataatttgcccggtatcgattccggcatcgatatagtgaatggtaacgcccgtctcagtcacaccagcggcaaaagcatcctcgatgccgtgacgaccaggaaactttggtaacaatgctgggtgaatattgatgattttatgagcatacgcattcaagagggtcggaccaataatgcgcatgtacccggccaataataccagttcaatttgccgtgcttgcaaggccgtcaaaatgattgcttccgcggccgctttattcgcataatcatgaaaatcaacaattaatatcggtacgttagctgcccgggccttgtcaattaccggcgctgtcggttgatcacacacaagtaacccaatcactaccggtaattgtcgttcaataatcgcttggtggagtgcaacaaagttggtgccattacccgaagcaaatactgcaattttattaggcatgctcagcctcctcaaaaacaacgggtgtcgtaccagtttggactgttccaactcgataataggactgagcgttggccgtcaaattagccgtcacagctgccacttggtcggagtgaacgatcagaaccattcccaagcccaagttaaaggtcgaccgaagatccgtagcagtcagcccaccgagttcggccaataacgtcataatcggcggtgccggccattgacccaattcaaggtgcgcactcaagcccgccggtaacgctctggcgacgttctcaatcaagccgcccccggtaatgtgggcgatactcgtcactaatttctgctgtaataatggttgaactgcatcaacgtaaatggtcgttggtcgtaaaagttccgtttgtaaatcatgaccaagttcgtcaaaaaccgtggtcaattggtagtcgtgttgtttgaataaaatatcacgaactagactaaacccattcgagtggaggccattagacggcaacccaatcaagacgtccccagcccgaacatttgctggtgataacaggtccgcgcggttcgcaattccgaccgcaaaaccagcgaggtcgtaatggtcctgaccatacatatcgggcatctccgcagtctcgccaccaatcaacgctgtatgggcctgctgacagcccgtgacgacgccagtcaaaatggctttgacccgcttctgatccgtatgtccaagacctaagtaatctaaaaagaactggggggtcgcgccttgtgccaaaatatcattcacacacattgcgaccaagtcaattccaatcgtggtatgttgatcagcagcgattgcgactaagagcttagtccccacaccatccgtccccgctactaacacgggatcgttggcagttgcatccggactaagtggaaacgcccccccaaacgcgcctaattgctgattgccactcatttgtttgaccgtctttaagacgtcgtaaccagcgttgatatcaacgccagcccgcttatacgcatcgctcacttgatcaccccttcatgattggcttgtaattgcgcaatttccgcatcatactcggcttggtaatcatacagggccgttggataatccccattaaaataggccatgcatagtccaccatacggttcggtggtcgacaagccaactgcatcaacgacgccctgttcactgagaaaaccaagtgagtccgcaccaaacgtctgacacatctcccgaatcgtttgctgagccgcaatcaattcattagtcgattgaatatcgataccgtaaaaacatggatagcgtaatggtggcgatgcaattcgtaaatgaactgactttgcacccgcatctttcaataatttgacgatccgccgactggtggtaccacgtacaatcgaatcatcgattaagacgactcgtttaccagcgacaacacctttgaccgctgaaagcttcatccgaaccccctgttctcgcaatgcttgggtcggctgaataaaggtccgtgacgaatattgatttttaattaatcccatctcgtaaggcaggccactcgcttccgcatagccggtcgccgctgataaagatgaattgggtaccccgacaacaatgtcggcgtccacgggctgttcaacagcgagctgagcacccattcgtttacgtgcagaatggacgttgacgccgtgaatatcagaatctggacgtgcaaagtagataaactccattgaacaaatcgccaactgtgtatcagtcgtataatggtcgatcgtcaaaccatgatcatcgatcgttaacaattctcccggctgaacatcttgaacaaacgtcgcaccaatcgtatcaagcgcgcaagtttcactacaaacgacgtacccgcccgtgggtaactgaccgacgactaatggtcgtaacccgttaggatccaaagcggcaatcaaacaatcattcgttagtagtaagtaagcaaagcctccgtggacttgacgtaaagcatccttaacctgttccgttaacgttgctgcggggctgcgtcgaatcagatgcattaaaatctcactatcagaactagcatgaaaaatggcaccatgctgttccaaccgtcgccgcagtgtcaccgcgttcgtcaaattgccgttatgtgcgagtgcaaactgtgagtcgctaaaattaaaacccaagggttgaatgttttccaatccatgattaccagccgtggcataacgtacatggccgactgcagcttgacccgtcaaacgtgccaaccgccgtgggtcccgaaagacatcagccaacaaccctagtccgcgttccgtctgcagtttgccgtgatcattcgccgtgataccggctccttcttgcccccggtgttgtaacgcatggagcccaaagtacgttaattgggcggcgtccggcgagccccaaaccccaaagacgccacattcttcattcagacttcttacttcagtaggcatggtaaggccccttcccacaactgtttggcgaaactaaccttaatatcaaacgcctgatcagcagtttgaacgtgtagccgatccgttgcagttgttcgtcctaaataggtcacatatggttccattaaactttcaaacgcggcttgctgtgctggtgtcaccgagataacaaatcgtgactgcgtttccgcaaagaagttggcagcgggcaagtcactggccagttccaccccgatattttgtggaaaacatgattcggcaatcgtcgtaatcaagccaccttcagaaacgtcgtgggcactagcaactagtcctttttgaatcgcagttaacaatagacgctgattacgattttcagtcacaaggtcaaaatcaaacagctcgccactgattgttcccgtcaacatcttttgcagctcactaccattgaaatcggcttctgtggtacctaacacgtagactgcatcgccagcgtgtttaaaatcgctagtcgtaatatctttctgatgcttaattaacccgaccatcccaatcattggggtgggatagatggcttccccgttcgattcattgttcaacgagacattgccagaaatcacgggcgtattgaataattggcaggcacgagcgatgcccatcgccgattcgtccaaatcgtaaaattgttcaggtttctctggattaccatagttcaagcaatcagtgatgcctaaaggttgaccaccggaagcgacaatgtttcgagcagcttccgcaacggcgatttctccaccgacacgggggtttaagtataagtatcgcccgttaacatcggtggtgaccgccaacgccttatccgtatgtcgaatccgtatgacccccgcatcggaacccggcttgacgaccgtattcgtttggacctgcgagtcatacgttccatataacgacgctttggaagcaatcgttggctgttggagcatcttcttcaatgtgccagttgcatcaactagtcgtggcataaattgatgatggctctgatggttcaagcgcgttggtcgtttcttttcgcgttcatagaccggcgctttggtcgcaagtgcatcgacgggaacatctgcaactaacttaccatgatggaataattgatactggtggccggctgtcactttaccaattgtgacagcatcaagaccgtacttttcaaagacttgataaatttctgcttcggcaccagctttgacacatagtaacatccgctcctgtgattcagagagcatcagttcaaacggcgtcatgccagtttcacgttgtggtaccaagtcaagattcagtgacaacccactgcctgctttggacgccatttcggctgaggaggaaactaggcccgccgcgcccatatcttgaatcccgattaaaacatcacgatgatcatgaataacctcgagacacgcctccatcaataatttttccataaagggatcaccaacttgaaccgcggaacgctgggtttcattggcgtcattaaattcagcagaggcgaaggacgcaccgttaatgccgtcacgccccgtttttgcgccgacataaataacggcgttgccaattcctgttgcttggcccttctgaatatcagcttgatccaagattccaacacacatggcgttcaccaacgggttcttctgataactcgcatcaaataccgtatcaccaccgattgtcggaattccaatacagttgccataaccgccaatgccggcgactacttgcgaaatcaagtatttcgtatgagcatcagtcggttccccaaagcgaagactgtccagcagcgcaatcggccgggcccccatcgaaaagatgtcccgtatgataccacccacacccgttgccgcaccctcataaggttcaactgcagacggatgattatgactttcagctttaaagaccacggcctgaccatcaccgatgtcgataataccggcgccttcaccaggcccttcaagtacctgttcaccctgcgtccaaaattttttcaagactggttttgaattcttgtaggagcaatgttcgctccacatgccggaaaacaacccggtttcagtctcgttaggtaagcgttgaaggaccttatccgttaataattgatactcagcatcggttaagccccaatcccgatagaccttagaatcgcgaacatctgtaggtgataatggttgctttttaagcatgggtgacctcctcttgactcgcaatgaccgattgaaaaattctgagaccgtccgtggaacctaagatcatctccacggcccgttccggatggggcatcatcccaagcacatttcccgcttcatttgtaatgccagcaatattagccgtgctgccatttggattctcgacgtattcgaagatgatttgatgattagcacgtaattgcgccaaggtggcctcatcacaataataattgccttcgccgtgggcaatcggtaaactaatttgatctgtcgatccgtatgcggtggtaaaaatcgtctcatgattggcaattcgtaatgggctgtcctgacaaataaacttcgctgagcgattggcctgcaatgcaccaggtaataatccggcttcggtcaagacttgaaagccattgcagattccgatgactggtttaccagcgttagcaaatgcaataacggccggcatgatgggcgcaaagcgggcaatcgcaccactccgtaaataatcaccgtacgaaaagccaccaggtaacaccaccgcgtcataacctgctaatgaggtcgctgtcgccggaatcaaatcagccgtaacgtgtaaaatatcgcgcaaggcattcaccatgtcatgatcacaattagaaccaggaaagactggtacggcaaatttcatcattacaaagcctccatctcagtaatttcgtaacgataagtttccatattaacgttggctaacaagcgatcacacatctcgtcgatttcagcggcaactggccgatcatccgcgtgaattttcacctcaaaatacttacctaattcaacggcatcgacattcgtatatccaagtcggtgtaaggcatcatgaatcgcctcacccttggggtctagaattgattgcttataagtcacatagattttaactaagtacatgttaggcctcctcaacggttgctagccgcgtcaatacttcctgataaacactagtcaagtcgcctagatccttgcggaagacatccttatcaagcgatgcaccggtctttaggtcgactaaccgacaactatctggtgagatttcatcagccagcaagactttaccggtggtcgtcaacccaaattcgattttaaaatcaacgagctgtacccccatcgccgcaaaaattgccgtcaaacgctggttaacctgtaaggcctgccgtttaatttccgccacgattgccggtgttgcaacatttagcgcgtggatttgtgaatcattgataaatggatcatccagctgatcactcttatagaaaaattccagtactggttctgcaaatttggttaagtgtggcacggcaaatttacgctcaaaactacccgaagccacattccgaacaactgtctccaagggaatcatggtcacgcgacggacaagttgcacgtagtctgaaggttgctcaataaaatggttggcaatgccgtgattggctaagtctttgaaaatcaaactcgcgatgcgattattcaatcggcctttctggtcaatgggaaccttccgcttaccatttagcgctgttgcttgatctaagtattcgacccatagaatttcaggatcattagtggcatacatcgctttcgctttacccgtgtaaagcaaagcttgtttctcaatcgctgccgtcattattattgttcccctttcaaatttgccaccgacgctaatgctgcgtcaatatcgtgatttaatacggtgacatgacccatcttgcgctggggcttaatggccgccttaccgtagtcgtgaaaatgccattctgggtgttcaaccaactgttgacgtgccactgttaagtcatcacctagcagattacgcatcactgccggactggtctgcgtaatggccggaatcggtaagccacagatacttcgaatatgggcctcaaactgcgagatgttgcaggcctcaatcgtatagtgaccagaattatgtgggcgtggtgccagttcattgactaataaagtatcatccggtaaaacaaagaattcgattcctagcacgccgcgtagttccagggattcagcaatcgaaaccgcaattttgcgggccgcactatgaacactgggctgaacattagctggggcaatcgttgtgtgtaagatatgatgttgatgctgattttcaactaacggaaaagtcgtaacaacaccagcagcactacgcgtcaccatcatggaaacttctgttcgaaatttctgccgcgcctctagaatgcacggctgtgtcaataaggcactagcggattttgtcaccactgctgtgtctagatccgtttgtccgtgaccatcgtagccacctgccgccgttttgagaattgccggcgtaccaacacggttgagggcgtaatttaatgactgtaaatccgtcaccggtgcgaaagatgtgactgggatgccatgatcatgaagaaattgcttctcattaagacgatctccagtaatatgcaggagtgcagtgccctgcggtaactttgcataggcttgcgcagcaatcaaagcattctcatcaacgttttcaaactcgtaggtcaagacatcactacggcgcgctagatcaagtaaagccgcctgatcatcataagccgcaacaatctgaaaatctgcgacctgggctgccggtgctttgggtgtcgggtcaaggacacctacccgatagcccatcgccttcgcgctaagcgtcatcatctgaccgagttgaccgccaccaacgattccgatcgttgcgggtggtaagagtgcttccttaaaattggcgttcactttgttcagcctcctgacgttgacgagcacgaaattctccaattgcatgttgtacttgtggttcccgtaaaccgataatttgggcggccattagcgcaccattcttagcccccgcatcaccaatcgccatcgtcgccacgggtacgccagctggcatctgtacgattgacaataacgaatcaactccgttcaacgtatgggtcttaatgggcaccccaattaccgggagtagtgtattggcagctagcatcccgggtaaatgggcagcgccccccgcacccgcaataataacttgaattccccgtgacgctgcttcttcaccataggattgtaatgtctggggcattcggtgggccgaaataacgtgacgctcataagagactcccagtgccgttaactgttctgccgctaattgcatggttggccaatcagaaattgaccccataatcaaaccaactttcgccatcatgatccctctttccctgttttcaccattagtttagcaatcaggcgggacactgtcaacgaatttcttaactttatctattaattaacgttttaatgttcgtgttaatgaaattgataattagattaatgctacctcaacatgtacgaattacctcactgtttgcaggtttccggtgtctggaaaaagttatcaactgatttcaagcgactattttgataatattattaatattgaaatttccgaacaatccgtcatcatctaaattccaccataacaaacttactgctaccattatcaacaactatccgttgaaacgggccattaacttttgtcggtgcgcaccaacaattaacagcaatgactgggaatcggcgtaggacgagcaactaagcatgtttatgctaactcagactatttatagcggggataaactgactgccgctgaacttaaaaacaatcaacaacttaatttgcgaacgctttcctaaaggatcggattgaagtgaccaaaataacgcaaaaaaagtctcaaggaagcgattcctcgagactttttaaggtactaattattttgctgaagcgccggaaacactatcgacatcaggtgcttcaggcttggttggtgcttctggtgcggcttccgtatcggctgaagcgccagagacatcatccaccgctggggcagcatcaggcttcgtttccttcgccttcgatgaagctcctgaaacggcgtccgtcttagcatctggatcaggtgctaacatctggcccgtctgcttcaggtaatacttcacgattggtaagaggtcgagcacaaactcgttgatacctttgtactcacccttatcgtcatgcaaagcttgataatagtgcatcacatacttattagggataccaggtaccggtaacttgaagagatcagtctcaccggttcgtagcatgtgtaccgctcgcttaacaccaggtacggcccgctttggatgacagtcagctagtggattaccggcttgagcaggtgtccgtgaagctaacatcttgtcgccatccatttgatggttatagtataaaaattggttgttggcatcggcatacgtcaattccattggcatcgagttgaggaaccaatttaattggttgacggtcagcacaccccgatcgagcttaacgtagtcgtcaccctcagccgcatgggtcttggcagccgcttgttcgacccaatcagccgcatgcatgttgacgcccttgattgtcgtttcaacttcgcccttagcctcaaggtcttcattcttccaatcatcagcgtgtgcttccgcatccatcgcgttgaccatctttacaaacttcagaaacttgcctaacgtttcttgtaagaacgagacagtccgagcatccttcagattgttttggtcatcgaaagcctgcttaacttcgccgagcaaaaattcattaccaggcatgaccacagcatcaacacccggtgactctaaaatctggcgtagattcaactgtgcccgcgacgaaccttgatcatagtaagaagcgccaacgatcaatacgggtttccctgacatcgggtgaattttaaacgacaaccattcgatcacgcttttaagtgcagcagtaattgtatgattatgttcaggtgtcgcaataatgaccccgtccgcctgcatgatctttcgtttcaaatattgaacagcttcaccttctgtttgatcatcactctgattaaacattggtacatcttgaatatccaaaatttcaatatcaaccatgtcactaaaatgattagcaataaactttaacagtaaccgattataagacttatcttcaattgaacccgcaattccaactaatttcatcgtcgtcgccctctctataatttttcccaatccatttcacgaacttcttcatacgtcgtcgcgttggcattctttaattttttcgtgatttcgacaaagacttggaaatccttgaacaacccatcgagcttcgtcgctttctgttggtccgttaaattcccctggtcatcaaaggcttgcaatgaatgaccaagcataaattctgaacttggcatgatccgcgcccgtaattctggtgaatccaaaacttgccgcagatgtgcttgagcccgtgatgtgccgagtgccccgtatgaggccccaataatcatgacgggtttgtccacgaagggctggatatggaatgataaccattcgagagcattcagtaatgccgcgggagccgaatgatcatactctggtgtactaataatcacaccatcagcttgttcgatcttatccgccattgcttgcgcctgtgccggaatttcatgattttcgggcttattgaagattggtagacccttgatttccattaattcaatctctgcttgatccgcatagtgggactgcatatattgcaacaacttacggttggtcgactcatctgaattagttccaaccatcgcgataaatttgtgcattgagaacaactccttctatgatcaaatagtcaaatattatataatttcttagtcaataactatattgtagtagatttcactaaagaaagcaaaacaattttaagcgctttcagttttactatgcaaacaactgaactcactgatattaggcttatccgtgcaatcaagtaaattcagtatccgcgcaacgttgccgcaattatatctgcttaacaaattttttcacaaagctacgacgctacgatcaaatcaatcaaatccgccggggcaattcgaccaaagtaatgggttaagtccaacggtgctagcgccgtcataatcgcctgccgttcatatttcacaccagtcaaccgtgcaacgacgggagcaatcggttctgcaccgaagaaatcgccataaatcgtaactgcttcgatgcgccctgccaccacgtttaactgaaactcgacggtcccagcatcaaaatgccggcgctgcttaactgtaaacgctggtgactgaccgtaaatccaatcccagttggtaaaatattgttggttcagtgctgctacccctgccagtgccgtttcatctaactgatacgtcttagcttgactcaaatcagccacgcccaggatttcacgggccaacgtatcgcgaaattcctcaatcgtcaagtgctgataagccggcgccatgtacggtttcaagttcgtgactcgacttcggaccgacttgatacccttagaggccaacttatcggtcggcaccgtaagagctttcgcaatttgcgtctggtcgacatcatacatcagcgttccatgggagaacatccggccattctcaacgtgcatggcatttcctgagaacttcttgccatcaatcaataaatcattgcggccactcatcgtcgcaccagtggcccccatcgcgtgtaaagcctttagaactggtgctgtgaaccgcttaaagttaccaaaaccgtccccgtcgtccttagtaataaaactaaaactgacatttccaaggtcatcataaaccgctccaccaccagaagttcgccgcgtcaatgtaatgtggtgtgcgtcaacatagtcctggttaatctctgccttgacattttggtaacggccaacaatgatgcagggggcgttaatgtaaaagtatagaatcggttccgtcaaatcggcatgttccatcaagtaagtctcaatggcaagattcgtgcgaatatcatggctggagcttgcaagatagcgcatcgtcacacttcctattctaaataaatccgttgcaaatcattgatttcattgttagttaatttaagctcagtgtgtaaatagtggtttaaattacccgattgtcgtttaatttcggtcatagcggcgtccaaataagccgcatcaactgaccagagggcccgaatactttcgaccgttgcatctgatgcgccctgagcacgtgcttcggccatcgcaccattgatccggccaatcgaagcctgattagttaagagataatcctgcttgatcgtttcaaaatcgactccgagtgcggttaacaggtataccgcccccattccggtccgatcttttcccgcagtgcagtgaaatagtaacgtcgaatcgggttgatcatttgcaagtagattatcaaagaaccggcgatactcgtccttggcatgttgctcgtcggccaccatctgatagacctttagcatgtgcttgaatccactatctggatgcttctccaagttagccgtcatcttgtcagtaccgtcagaattccgcgtttcgtccacattgaacactggtgcgtacacgtacttagcattggcaggaattcgatctggcgcatctaagacttcttgtggtgaacgaaagtcaatatcgtagcggacgccataatcatccagcaaagcttggccggctggcgttaattgatcaagtccaccagtccgaatgaccttatgccacttgatttttcgaccgtctttagtcgagtaaccaccgagttcacggaaattaatgccacctggtacagttaatacacgttgatttgtcatttttgaaaccacctatctgttaacttttcattttctattctaacattatcggtcagtttaacggtgccccaatcaccgaatcagtcgctttatttccaagataattcgttagcaccatcgacaccaaccgacatcaacgcgtgctataatgtaagttacatagccagcgacggcccgtcgaatccagaacacgtttgctgacaaacagcatcacaaccttggaccgattagccataaatttccatactggcactaaataaaaaatattcactgaataatataacggaggatctttcgatgacatttgattatgcacaccaaactgattggcccatgactagtggtcaacatcagtcaccaatcgatattcaaacacaacacgttcagtcttcacagctatccgccatcagctggcgaggcttgtaccaagccaaaacgattacgggcgaagcgacaactttgaaggctagtggaattggtgccgcttatttgaacgaccgcgactttgcctttcaacagattcactttcatacgccggcagaacacttaatcgatgggcaagccgcaccaatcgaatggcatctcgttcatcaaagtgctaccggccagctcgccgtcgtcgccgtttttggacggattggcaagcctaattctagtttacaaggcttacttgaccagttcacagcccaaacgagccatgaactgacaacaccggtcaacttaactgagctcctcccagataccgggacggtctatcactacttgggctcattgacgacgccgccactaagtgaaaccgttgaatggtatgtctgtgccgatactgtcatgattggtgaacaacaattagctgcttatcagcaattatttgccgctaataaccgcaagattcaaccgttaaacgatcggccaatcattgccgaacgtttctaaataattttaatggggtgagctgatgcctaagaaagtaatctggggcttgattgcaagtggcctatttcttttattgatcgtcggtctcggactgacaacacaaatccatcaagataaagtcagtcacgtgattactgcgcaaaaacggccattgatcatgattggaggtagtagcagcacgcggactgactttgatgacatcgtccgttcacttaatgagcaacagcaccatccgctcatcaccctgactgttaaggcgaaccaaaaattggcgtttaaagaaaaacgcgtcgagaacaccaaccttaacgatgccctcatcgtgatctttttcgaagatagcacgaactcaacagagaacattatgacccaaacgaacggcttagccaaagctattcgttatttgcaacgtcaccaacatctcaccacggccaacgcactcggttattcaaatggtggcctgatctggagtcgctatctagcaggtttgagctcgtccaaaccattagcagtccacgatttgatgttgattggcaccccattcttgggtactgatgctgcacatcctgataaaacgctctatacaccacttcttgatcacaagaaccaattcaagaaattgcatgcggtcatcaacattgccggtgacactggcgagggtaacgacgatatcgtaccgctcagcagtgtgaacgctggtggcaacttatttatgaacaatgttacccgctataccgccatgactgttaaccaaaaatcaattagtcacggtgacctgcttcacgaagcatatgttgcccggctcattcgtcaaaatctgatcaatcaatagtatctttagctttagctgataaaaaactgagccacccttcataatgatgaagtgatggctcagtttttttatgattgatcgtccgctatgactactggcgatcaaactatccaacaattttgtgtcacgagtagcccatacacgggttgcgcagggctcaaaggggcgccacgtcgattatgaattggcagtcgctacaaatcgagctagctcatcggtcgacataccggcactgacacccaccagtaacttaatccgggctttttgtccattcaatccctgacaaaaaatcacacccatttgttttaattgaacaccgccaccttcataagcatagacatcctgagcgataccgttgaagcaccgggaaaccagtacaaccggaatctgcatgtctaataatttttgcacagctggtaacgtcgccggcggcaaattccccgctcccaacgcttcaatgactacgccatgagtcgtgggttgcgcaatggcgtcaaatagttctggtcccatcccggcatatgctttgatcagaaaaacattatctgtgaccgtttgaatcgggcaaaccgttgaccgtagtaatgattcaaaaaagacaatgcctttattagcgactaacccaatcgggccaaaagtcggtgttctaaaagtggccacgttggtcgtatgcgtcttagtgacgtagcgggccgagtggatttcatcattcataaccactaaaacacctttttcggccgcatccggtgtactagccgtttgaatcgccgtttcgagattatgcagaccatccgacccaatctcattggcggaccgcattgcgccggtaatcacaacggggagctcattcggtaaagtaagatctagaaaatacgccgtttcttctagcgtatccgtaccgtgagtcacaaccaccccatcgaccccttcgtgtgcggccttatcgatccgttgctttaactgcaacatccgtgccggggtgatgtgcggcgacggcacgttaaagacgtcctcagtctctaactcaatatccgtgccaaatgaactctgataattgtctaaaggattttcatctccgggggtcacattgccggattcatcagccgacatcgcaatggtgccaccagtgtgtaataccaaaatcttcttcaagaatactcctcctcatcttttcacgtgcctacgcacatctaacagtaaaattattttaggcttgccatcgcctaattgcaatccaccctcactggttcttcatgacaacttccttagattctcatacaagtgatatcaactaaaaaaactatcaaccattcaaacaatttacaaaacctagcaaccagatcagtacgttttattagcctacatagtgctagtcactcaattagttcacttatcaactagttcgttaatcggttcgtcggttagttaccccttcaggacgaagtcactaacctcagtgcaccttattactcaatttcagtctcagggctaaccgattgactactcgctagacgttgataaatcagcgtttgacgtcccaatgactatcaagcgagaaaataatgattgacactcgcgttagttgcctttatagttagttacataagtaattaaccaaataacttaagagaggtatttaaaatgacaaccacaccaatcatgaccgtcagcgacctgcacaaaacgtatggtaaggcgggcagcaaacaatacgaagcgttaaaaggcattaatttcaatgtgcaaccaggggaatttgtcggaatcatgggcgcatctggttcagggaaaaccaccttgctcaatatgctggccacactggaccaaccaactagcggtgaagtgactattcatcaacaaccgattacacatctgaaaggcaatcaacttgctgatttccgggccaaagagattgggtttatcttccaagatttcaacttattagaaactatgactgcttacgagaatatcgccctaccattgtcgctgcaaaatacgccagtcaaaaagatcaagccagctgtcgaaaaagtcgcacaccaattgggaattgaagaattcctatcaaactatcctaatgaattatctggtggtcaaaagcaacgtgtggcagccgcacgagccttaatcaatgaccccgctattctatttggtgatgaaccaactggtgcccttgattctaagtcagcgcgtgaattactcgacctgttcaccaaaatcaaccaagaacgggctgtctctatcttgctggtgacccatgatccattttcagctagcttctgtcaacgaatcttattcatcaaagatggccggattgggcaagaacttaaacgtggggatttaagccgcagtgatttttatcaacaagtcctcgacaacctagggacgtttgaacagtaagccgaaacagtaaaaggagtcctttaaactatgttaactaaacttgccatgaccggcttaaaacaccgttggcgcgactacctcgttctcttttcaggactgatcatgtctagcgcaatcttctatatgtttgaagcactggccactaaccaagatttcttaaaacaaaatacgagtattagtatggtcggcctcatcttccaatttggttccgtactactcacaatcatcacattagtctacattggctatgctaactcattcttattaagtatgcgtaagcgagactacgggctcttcatgctcgttggtgcacgcaaaagtaagattggtcaattaatttggctggaaacactacttgtcggtatcactgcaaccattgtcggcattcttgtgggaacagccttaactgtcggcgtaagccagattctgattaacagtctaggcctgacgcttcaccattttacagcctggtacacgccagctgccattgcgacactgttactctacgttggattgttcttaattgccggtttattcaacctgctatccctgaccaagacaccagccttgaaattactacacagtaatgatcaacctaaccggccacaactaaaaccagcccgtcaactcatcgaaattgtcgtcggtgtcatttcaattgcaattggttactggtcaatggctaacctgaaaattttgcaactgatgggaattggaattgcgctcgtcacaattgttcttggaacttatctgctgtttaacgctatttttgtctggttaatggtcgcactcaaacgattctcatttgcccaacgtggtttgaatggcttcaccttatcacagctaagctttagaattcgtaattacactaagatgctgtcaattgtcgcaatgctattcgcactagctctcggcgcaattacagttggaatgggctttcacagtcaaattccatcaatggctaatattaataacgcttatgatatgggactggtcaacgctagtaccgctgaaaaagcacaaattgcagcgatgaagcccaagacaacggcgacctatcatttcaaagcaaccaagaaagtcgtttatttccaagctgctgaattcaatcggcaaccattcacgactattcatactcgcaataagaatcaactgacttttaataccgttcataataatgcggctaaattacaaaaatcagaagataattatcaactgatgcagcttcagagtggtgtcatggcaaccgcaacacccgtatttttatcaaaaacggcgtacgcgaaacttgcccagcctgaacagcgactaactgtgtttactaccaacaacgttatcgaacatcgcgttgcattgaacaaactggccaaacatcactttcacactaccagccctgaacaatttggaggtcgctatgcgatgtatctaatggttaacggcatgtactccgggctggaatttatgggtatgttcctcggaatcgcctttcttgcaatgctagctagttgcctgatgttcaagattctgtctggtgccgatgctgatcaacaccgttacaagatgctcgataaagttggaaccactagacgccagctcaacggtgccattaacaaagaaattgctgtgctctttattcttcctggaatcgttggtattgtacacgtcttgtttgggttacaaatgttcaaaatcataatggttacctcaccatataccggaatttggttaccattcttgatttttgccggtctctacctactttactatctcattacgatcaccatctatcggcgaatcgttttacaataacctttcggaggagggaaaaatcatggtatactttggattagtcgctttattaatcgttattacaccattacaccgttacgtgctcgcaagtcgtcgtcaattctggttaggggcgctcatgccgcttctgtggctgagcgttaacttcggtttagccacccagattatctttgaacatcaagacattctactggccgtactgggcaccctcctcctactctctagttggattgctgcccggatcgatcgtaccgaacgacaactgcaccagccgcaacaaaaggccacaacgaaatagggcaatcactgcaatgaggtgaataaaatgcagttcaactttaatagcacggaaccaatctacttgcaggttgccgaccaaattgaagaagctatctttacggaaaccttcgctgaaggtgaacaaattccttcgacaaccgagatttctaaagaatttcatattaatcctgcgaccgtgcttaagggcatgaatattctagttgatgcccaactgattgaaaaacggcgtggggtcgggatgtttgtcatcgccggtgcacaacaacgaatcgttgaaaagcgccgggatcagttctacaccgactacgttaaaaaactagttgctgaagcacaaaagctccacattacgcaagatgaattagctaaattaattgaacgggggttttccgaatcatgagtattcaagttcaggctgtccagcaggcctttcgcggtcaaaccgtactggataatcttaacctaacgatcaaaccaaacacgatttacggtttgctaggccgcaatggtgctggtaaaagtaccttgctgaacattatcagcaatcgtatctttgctgacagcggaacggtcaccatggacaacgaatccatgtgtgataacgaccgcacgttaggaaaggtttacttgatgagtgaagttaacctctattctgagcgttcccgggtcaaacaactgtttaaaaccaccgcactactctatggtgattttaatgacacttatgctaaaaaactagcacaaacctttggcctcgatttaaacgcgcgatttggcaaattatcgacgggttaccgaacaatttttaaactgattattgcgttatgtgtaccggctgaatacatctttttagatgaaccagtcctcggtctggatgctaatcaccgcgaaattttctatcaagaactgattgaaacctatagtgaccatccccgcacattcgtgatttcgactcatctcattgaagaaattacgaacttgattgaacatgtctttgtgctggaccatcatcatattattgttgatggtgatgtcaccgacatcctagggcaatcttacgcggtaactggtccacaaactgatgtcagcacttatacggatggtttaaatattatcggcaaggatcatcttggcggaattacggcccactacgtttacgggccattagataacgaccgaccaattcctgatacggtcacggtcgagcatctggacctacaaaaactatttgttaacctgactaataccaaggaggaggccgccgctcatgtcaattaaggttcgcaacaccacccgttatttattaacggaacaattgaaaatgacggggtggtcggtactcgctttattcgtcgtattcggaatactaccactactatttgcagttattacgggtaatattcggcagtattctccacttggtaattttgctagcctaagcctcgggccactcttcttcatgcttatctttattgtggggtcactcacttacgacaactttaagctcttaatccaaaatgggatttcccgacaaacctactttcaagctcgagtattcgcattactcatgcttagtggtttgcttgtcatcatcaatgccatttattactacggtattcatgctccgtatttacactggagcaccaacaccgcgttgatgagaacgggctattcgctgtatagccatgcgctgggaaatcaggtctggctaaacattttagctagcttatgctttaactggattttctacattggcgttggccttaccggcatcgcttgtgggaccttactcgcgttatttggtaaatgggccaaaacgattttaatcattggcactcccatcattggcatgcttattatttggataatggtcatcattatgactcgcaatcaatcgaactataattacacggggcttgaaaacttcttgaaatttattattggttatcccagccacggtgaagcgacaactggttactttaacccaaccatgccattcatcacaatgctggtaggttgcggtatcattggtggtctcgcctatctgttcaaccgtaagttaagaatcagaaattaagctgataatctaaaaaatgaagcaggtcgtgaagttattgacttcacgacctgcttcattttttaatggttaatacaaacgtcacaccattcgagaagtggttttcccactaacgctacttttcaacctgcgtattttgcaaatccgtcttaaccacgattacatcagtcaacgcattacgctgcacatacgttgtaaccgagccttccagcacgcgttcaacggcatttaacccggttgcccccatcatgatcaagtcattatgatgatccttgacgaagtcctgtgaaataattggtttcggacttcccattcgaatgtggaaggcaatgtccgtaaagccatcctttttgacttgatcaaccgtttcttttaaataagcttcagaatcctgaaccaattgatacgtaatatcaccatccgccaaaccagctaaattatacccaaactgaccgggatcaatgactgctaacacgtcgatatgtgcctcattacgtttagcgactgcaactgctttatcaagcgcaatctcagcttgttgtgagccatcgaggggaactaaaatattcgaatattcttgtaccattgacgtcacgccctttccatctgttaattctattttaccatttatcagcgttggttgcgttatcatttatataaactaactaccagttatgcacagcagctcgccggctagcagtgtcgggtttacataatatttacaacaacgacatctgatatttacagttaccccttacaattggagttaatccacttgggggtgaatagtatgctttctttaggtattcgaccaggcctaatcgccagccatacaattgtaatcaacgatgccctttcatatcaaatccggttaagcaaattgcgtctcggacccgatgtctatcggctagacatccgtgcaaccactacactgggccgcttgaccgtgtcccacgcacattaccataactttgccacggcccagcaagcctttaatcatcagcgccaccaacttgaatcgcactaaaaatatccaacacgcagccatttaattatgataggatggtacctagtaataatcagctaaagtgagggtattcatctgtgggacaacttatcaaacaactctggcaacgctatcaaagcgtcctttcctatttaatctttgggggcttaaccaccctaattaatattattgtttttggaattttcaaccaattctggccctactggatagccaatacgattgcctggctcatctcagtgctattcgcctatatcacgaataaaatttgggtatttgactcacaaacacctactttccgtgctgttttaattgaaatgacatcattcttcggattccgcctactcagttactttattgaccaggggattatgattgtcggtatttcggttctgcacggaaacgaccttatcgtcaaattaattgatcaaattattgtggtattactcaattggttcttcagtaaactatttattttcaaggatcgtggtcattaaagcgaaccaacttaaacatcaaaacaagcgtcgtaggaatgtccgaaaattcctgcgacgcttattttattcataataattaccgacccatcttttttctgatacttaacttagctactattttagcaaccatatttttcacccaaactggcgttgcaccgtatgtaacgtcgctaactttgtgaccacatcatcaatattgaccccatcccaattataaaaaatatattggcgaccacagcgcatcttaatcaccaaatgacgtgctgatgaagcataaccattgcgaacttcggcctgatccgtcgtcaatgcatagtattgaatgtcatccgtatttaaagctaactctccaattcgtatcatgacttgttgactgacctcagtcggcggtcgaactgacaaacaagtcccatcatggtgctgataccgtaactctaccgcaactaaaccggccgcggttagctgtggtctaaaataaaactccgcgccaatatgcaacgcacttgacggccaaactgcggttagccgaaatttaaaatgccggccatgaaaatcagtcaggatgccttggtcgtaatctggttgcattaccgtaatatgcccaatcatgacgattcactcccttcacttagttattgataatgtatcacgcttcacaagcatagttgtgtttaaaacccataatcagtcgtttttaccattttttattaaaatagtaattaaattatccttactcatgctaatatttgagttaaccaactttattgattggaggtcccattttgatgacatttacaaatcaagaaactgactatcttatgaacctactaaccaaccagttaatggccctactaagccgcgtcacgcgctggcagacgcacagtctgagtcaacaccaatataaccaacaagtacacgaaacgctccaacccgaactgaacatgctcacgcaaatcactgctaaactccagggacaagcccgtgaccaaactcagctaggggccattcaaactggtttgaagaaacttcaagttgccaccacctatcagctaactgccgaccaacttgcacacgctaatgaacgccggctgaatcgccgataccgcgattaacttttacaacatcagcatatttaccaggagattcaaaactatttcgcaatccttaacagaaaattcaaatttcaatcacgagttagctactttttctcggtacaatggttttatcaactcatacaaccacttgactgaaggagggcttccatgttcttaattgtttactgtacgttcgctattgcagtttttttctggatattcggttacgttaaaaccgccgtcatcattggtatactggcactgagcttgattgcttactccttcattcgccgagagattactcgacgacgtttgctcaagcgacgcacggttaccaataaaagtcgttaaaaaaattccaacacgccggtgtcggaattttttggttatttttgcatttgtgataaacaagtgacgatccgctgagccgcctcacgcacattttgcggattagtcgctaagttcaagcgaacaaacccctgatcatcaggactaaaacactcaccaaagtcaactgcgagctgacattgatcttgaataaacgctttcgttgcagctggctgaacgtacgcgcgtaaatctagccacgtcaaatacgtcccctgcaaatcggctaaaaccaacttaggcgcgtgggcggcaaaggtggtgcataaataatgataattatcacggacgattgccaaaatctggtctaaccaggccgcgcccgattcataagccgtttggccggcaacctggcctaagacgctgatctcagtctggctgaagcgcccgatttgtgcatcatagcgttgtcgtaattttggattaggaattactagatgtgagttcaaaagcgccgccagattaaacgtcttagacggtgcattgacgacaatcacccggttactaaaccgcccattggctaccgttaacgccgatttgaacggatggttggtccgatcaatttctaaatcctggtgaatttcatctgaaataacaagcacatgatactgttcacataatgctaacagccgtgtctcttcatcttcagaccagattcgccccacaggattatgtggcgaacattgaatgaacaatcgcacctcgttcgccttaatttgctgttccacatcttcaaagtcaatcgtatagtgaccacgatcattgcgtaactcagatgtgaccagctgacgatgattatcccgcaccgcgttgaaaaatggatagtacacgggcgtcagaatcaaaacgccatcacctggttgcgttaaaatattaacgagcgcgtacaacgaattgaccacgccactaccaaatcgaatccaatcgtgtttcaatgtcagaccatggcgtgcctgttcccaatcgataaaggcttgataataacgatcaggcgtaatggaataaccataaatgccatgcgccactcgttcttgtagtgcttgcgtaacttgttctggcactttgaattccatgtcagcgacccacattgccaacaaatcaggattgccataccgagcttgtagtgcgtcccacttcaatgaatccgtatgctggcgcgttgttgcgtacttcttaataaatgctgcttgttccatcttaaaggccttctttctcaacaaaaaaacttcgtccttaacttactaaggacgaagtttatactccgcggtaccacctattattacagtcttgctgtcgctcacgcaacgtactcgttacgttcaacccaattatcggtggtcaatccgggctaatagcatcaaccattagccaactccgagttcatcttcacaataagctgatggtcaaattacaccactactttgactcgctaggcatcaacttattgttactcttctcatcaacatttaatcttcacgttgcttctaagttacaacgtgaagattaaaaagtcaacaacgtctttaaaattgcgcttgctctaaaacctggtagccatcgattcgttggtcagcggtaggaaacgccccggtctgtaagaaacgcttggcctgcatgacccgcggcgaactattcgaccaatttaattgatcaagtggcactcgagcggcccccgccgacattgattcggtgtaatgcggtcgtttgagcaacaaatggccccccaccggttccagtaaataataaatattaattaacgttgctggcaattctaatgttgttaaggctggaatcgtaagctggacggtcccaagttgctttgaaataacagtttgtagtcctgtttgaagttgtgcaatctgactaacggcctcactcaacgtggcccgtgtcgtcactggtgcggttactaaatcataacggttcttgaacggcccggttaaggatttattaaggaccatggccgtcgaatcaccaatgataccacaaacaaatagtggactaattgctggttcgttaatcatcaatcttttccttctctcagtcatacgattaaatagataaattaattagcctataaaaatataacagttacattttaccttagaattatgataaggttcctaaaaaaagcatgcgaatatgaatatttaacaacttttaataattctatgaaaaaaaccgaatcttggctactaaaacgcacaaggttcgattactttttttgttatttagttagattgcacatcggtcgtattaataaatgactgggctggcacacgaattaaccaccgcgtcatggcttgatgccccacatggacacctaagccattccagaatgacggctgataagtggctgtcagcttcactgcgtaggctttttcgtgctgccggtcttctttaaccagctgcttttgtgcccacggaatacccgcatccgccactttaacttgcgaaagattagtcaccacggtcgccttgttacttgaaacagtatatttcgcaccattaacccagtaattataaatatgcacgggtttttgggtcgtgccccgatccaccgcgacatagtaggaaccattagtcccaactcgcaaaaccagtggttcaacttgatacgttaccttaacgtccttagcatctgacaggtcgacctggtgattgaaagtcacgtatcccatgccaactagtaatccgagactaacgattaattcaacggtggtaatgataagatttccccactcaaacgtatgcttacgttccacgatcatcttgatgcgtcgtacgcgaatatgatgaaatacccacacgactaacgccaaaacaatgatccacgcaatgatcccaatccaattccatgcagaagtcattgattgccaaccctttctcaattacattattatgttctaattgtaaataatccaaccttaaataacaagtaatccagcaaattcaacacaatcattcagaagcagattgtgaaaataatcactgaaacggtgccaatgtaatcgaattcatggtaaaataaagttattaacttgtagaaagaaggagtacacatgatcgcgtcactaatttattgggtcgtcgttgttggcttgattgtttggggtgtttggatggccatcctttccgcatattgggccagccaaaaacaaaacggcaacattttctttattgcaattatgaatacattaggtgccttggccggcctcttagtatggtgggtcttcaacaatcaagactggcagtactactggttatccagcaccgttaagacaaccaacctcttaggcatcgtcctaatctgctacgttgtcttgattgtcatcgaattcattcaaggccggggcatcaagcctgagacagctaaataatgattattttaaacgccaagcaagttgctaggcgttttttattgtcaaatgcggcaacaatcttgctcttcagtgtttgttacggtgataacatttgatttgtcatgctgcatgcttcatcatgattaataaaaaaaaaacgattctcaaagacattgagaatcgtttttttataagcgactgtcctaatggcggctatcggtcttgaagatttcaactgggaaacacacagaacgctccaccagtcgacttgtgacactacttcacaactaagccacggttaattcaaagcctcccggtgccatctcatttgcggtaatacccgctgttaagattggcgatacgccacttactgttgagactgtctgtgcacctaaattaaagcggccttgaatcgtctgttcaacatccgtccgcgttaagattaagcagtgaccatcaatcgtccatgtcaattggctagttgctaaaaagtcggcctgttgccggcgaaacttgatcaaacgcgtgacaaattgtcgaacttgttgttcttgctcgtctggttgccagttcatgcaccgacgattgtcatggtcggcaccaccggccatggccacttccgttccataataaatacacgggctccccggcaatagcatcagtagcgtgagtgcagatttaaatttagttaactgaccatgcaacgtggtcagtagccgtggcgtatcatgcgtatccaacgcgttgaacatcgcctgttgattaggttgacgatacatcattaattccagattggttttaccaacgtaatcttcaaggttgagttgaccattaaacaacgccagaattggttgtgtcagtggataattcataaccgcgttaaactggccgttaccgactaacgattgactactatgccaagactcacctaataggtacacatcaggtttgattgcccgtaaggcaccacataacgctcgccagaaaccatggtcgacctcatcagcaacatcaaaacgccaagcgtcaatcccgaattgttcgatccaatatttggtcacatcaatcaagtaagcttgtaccgcggggttctgggtgttaactttcggcatcgctgctcccgtcgcaaaggtttcataattaagccgcttcgtcttcggatcacgtcccaccggccagccatgaatatgaaaccaatcagcaaaccgtgactgctcgccatttttaatcacatcttgccactgtggtgactgctcgccaaaatgattaaagacggcgtctaacatcacgcgcataccgcgcgcatgggcaccatcgactagcgcctgaaaatcggctttcgtaccaaagtggggatcgatttcaaaatgatcgatcgtatcatacttatgattagatggtgacgtgaaaatgggacacaggtacaggccattgacccccagtgcagccaaatcatctaaatgcgctgtaattccgggcaaatccccaccataaaatgaatcacggtgaacacgcccagcaccccacggttgaacattagccgggtcattttgccgcacaccatttgcaaaccgttcaggaaagatctggtaccagaccgtctccttaacccatgccggtggcagctccgcatcactgacgtgcatatatggcatgtgaaaatagttgcccactgtttgccagttagtggcaacgtcgtcaaagaagccaccctcaccatagccaaccgtcgcaccggtcgtatccgtgatcagaaaggcatagaccacccggttagtcggtacggtcagcgtcgtctgccagtactggttgccctgcgtcgctaatccgggctgcattatccgccgctctagcgctgttgttccttcttgccataagtaagaatcggcaaacaaaatctccacttgggcaacatcgtcacgcgcagtttgtagtcgtacctgtagttgatgtgcggctaagacggctgtatcttcactttcagggcggtgcctaattccagctagttgcattgtaagatctccttttgtgtaaacgattacattattaactagaccatttacgtcaattatcctcatgattttggtgaaaacgtccccgttcgcctcgattttagtgtatcatttagtcaaaatcagttgaaaggacgttatccatgaaaacactttatcgcagtacccgcgaaactgcaagtcacaccatgacgtcatcacaagccgtacttcaaggcctgacgccggatggtggtctctttgtgcccgtaacgctaccgaccgctaattttgacttcgaccagctcgccacgatgagctaccaagaagttgcttacgaggtccttaaactcttcttcacggattataccgctgatgaattacacgcctgcattgacgcggcttatggtgatcagtttgatgacccccaaattgcgccggtcaccaagcatggtcagcagtattaccttgaactttttcatggaccgaccattgcattcaaagacttggcccttcaaatcctaccgcatttgatgacaacggcagttaaaaagaaccatttacaagccgaagtcgttattttagcggccacctcgggcgatactggtaaagctgccatggccgggtttgccaatgttgatcagactcgcatcatcgtcttctacccaaaagatggtgtcagcgcaatccaaaaacagcagatggtgacccaaaccggagccaatactagtgttgttgcgatcaacggtaacttcgatgaggcccaaacaacggttaaaaaactgttaaacgaccaccaattacacgcggaattagccacccaccagttccaattctcaagcgctaattccatcaatattggtcgtttattcccacaagtggcctattatgtctacacctacgctcaacttatcaagcaggggcaaatcaagaacggtgatgagattaactttagtgttccaactgggaactttggggatattttagctggctactatgccaaacaactgggcacgcccattcataaactgatctgtgcttccaatcgcaataacgttctcaccgatttctttaataccgggacttatgataaaaaccgtgaattcttcttgacgagttcaccgtccatggacatcttagtctcaagtaacctggaacggctcctcttctacttgacaggatcagacgccacggcgactgctaaactaatgactgatttgcaaacgaccggccgttatacgattacaccggcaatgcgtgccaacttagctgatttttgggccggcttcgttactgaaagccaagatcaagctgaaattcatcacctgaaccatgcccatcactacacaatcgatccacatacggccgtggcctcggcggttgccaaacagtatcaagccgcaaccagagatcagcggcccatggtggttgtttcaaccgctagtccgtataaattcccacaggccgtcctaacggcaattactggtgagcttagtgcggtagatggcctagccgcagttgatcagttacatgagttgattcaaacgcccattccagcaacggtcacagccctccgtactgcgcccgtgcgccataagcgggttgcggatgttgatgatatgggaacgaccattaaaacaattttaaatcttaactagaaagtgtgaccaagatgattacgaccattgcgttagacctagataatacgttactaacttctgagaagacgatttctccgcgaactgaagcagttctcaaacagctgcattcggccggcaaacggatcgtactgtgtactgggcgaccaattaaggcgattcaaccatacttacaacaacttgaactcaaccaaccaactgactacgcgattacctttaatggtgggctcgttcagcaaaacacgactggtgacgtccttgctcgtactagtgtgaccaaacaagatttacaacccttatttgagcaagcccagcgcgatcatttctacttagacgtgattgatttgaagcaagtctactccattacggatctaggcaagtcaccgtacgaagaattcttgcaaggcttaatgccatttaagaatgttcgttttgccgacctgcctgctgatgatctattcggtaaagtcgttagtgctggtcaagatgctaaaacagtccaggccaaattaccaagtcaaattaccgatttcttccacgtggtcccatcccggcggactttgttggaattcttaccaccgcatactgataaggccagtggtttgaaacaactcctcggtcactttaatgaagactatgacaacttgatggcctttggggacgaagaaaacgacctaggaatgctaaccgccgccaaagttggcgtagcgatggcgaatgcgattcctgcggtcaaggccgcaaccacccatgccaccctgagtaatgacgaggacggggtcgccgttttcctagaaaattacttcaactgatcccaaactgaagcctgtaacgggcttcttttttagcacaaccactcaaaatcaaactaacgaggtgtcccatgcaagatccccgcattatcccagcagaattaacgactggcgcttttttcgatattttagcagatgaggaccacagcttaagttatattcaggttagtgaagaagacatgagtcaccagcacatcgatcaccccatgctggatcacgtgcacttcgaaaatgtccggtttacggccagtcaatttgaacggcttgacttgaccgatgctgtctttatcaattgtgacttttctaattgccagtttgaaaaagccagctggctacgcgttcaattcaaagattgtaagctcgtcggtgtcgacttgaacgaggctgccctcaataacgtcgcctttgaccactgtcagctcgacttagccatgctgtgcgacatgcggttcaaaaccgtgacctttgatcactgtcggctgaatggggccagctttatgaacaatcgactaacgaccgtcaagtttaacgaaaccaaccttgaccaagtcgctttcaacgataccgccctcaaaaatattgacctaagtacctgtcaattcgagcgtctcgaacttgatactgccgcagcacgcggtatgatcgtcaatattgatcaggctgcttatttggctgctgctttaaacggcatcaaagttaaaccctgataccggtggaacagtcaccgtatgagtgaccaactcacaatgccaaggacgattaagctgctggctggtaaatcttctaataacactgcacgtatctgtcagaatacttttcacgcgctgaacacaaaaataccacctccgtcaggtaacaacctgcgaaggtggtattttgtcgttcatcatgacaattcgaattgcgccccggtgtaaccagtgcggtcggccgccgtgattggtcgaataacttggcaagggttgccagccgcaatcacgttagctggaatatcgtgggttaccacgctcccaccaccaataatcgtgttagcaccaatggtcactcctggtaatacggtgacgttagcggctagccaacaaccatcaccaattgtgattggtcgggcgatgcagccgcccctaattcgttcggttgcatcaaacaagtggttgctcgtgtaaaggccgacttttggccccaacaagacctgactgccgatcgtaattggcgccccatctaacattacacaatcatagttggcataaaagttatcacctagatgaatgttccgtccaaattcaacgcgaaaattaggatttacaaatggcttgcgaccagctgaaccaaccaattgtcgcaataaagtttctttagtctctggatcagcagtcgcattgaccgcgttcgttgtcaacgtcgcttggtcacgcaacgccgttagttctgcatccgtatctcgatacggctgaccagtcgccatatacgcaaacttctcatctaaattcattccgcaccccacttctatcgaataaaattcaagtaccatgttattgcgcagattccttgtgctgaacgaatctggccattctttaataggtcaatcactttactgagcgggacaagttgcgtattcacgtattcgtccgcgtcaaaatgtcgttcgccatgttcttgcggatcaatgtgagtcaaaatcaagctgaccgtttcgtccgtaaaaccttccgacgagctaatttgcgtcataatttgtgattcatgggcaatgtagcccgtctcctcttgtaattcacgggccgcggccgttaacggatcttcccccgcattaatgaggccagcaggtaaactaatcgtctcggcattgcgaccgacccggtactctgaacctagcacgacttggtcatccgcggtgatggctaaaatcgtgacggcgttcccatgctgaatcaaatcgcgttttacttctaatccatcaggtgtttgaatcgtttgtttgaccaaatcaaaaatcggcccatgatacaccggtgtcgttgataggaccttaccgcgccggccaactttctcaaataaatctgccatacacattcactactccttaatctatctcaaatccggtacaccatccggcagcatcttacgaatgccacccgcggggtctggcacgtcaccttgatatcgcggtatcagatggagatgacaatgcattacggtttggcccgcagccggatcaacgttaatgccaatattatagccatccggatgattgtgcgcatctaggtacgcttttgcttgggtcagtaaggcgagcatcgcattcctggtcgccgtgggcacatcaaaatacgtggcataatgtgctttcggaataatcaacaaatgccccggactcaccggctttttatcgaagaaggccgctgctaggtcattctccaaaatatacggcaacggctgacaaaaaatacaagccataccaaagtccccttcctattttgctaaccaaccaccatcaattggaaccaccgtcccatgaatataatcagcgtgctgactcgctaagaatagcgtcagatctgcaacttcctgcggttgggcccaccgttttgcgggcgtctcactggcaacccatttcgccatcttaccatcgccagcaaaatcagcggcattcatcggggtatcgatagcccccggcgcaatgcagttggcgcgaattccctgagccgcatagtccaagtcaagttgtttcgtataaccaatgatggcgtgtttggctgcggtatacgctgcgccgcctccgccacccaccagtccagcgatcgatgccatattcacgaaaacgccgtgttgtgcggctaacattgcaggtagcaccgcattagtcacgataaactggcttgtcagatccgtcgccaaaatatcttgccacgttttcagatccgttgctaaagttggttgatagccgtctaacttaccggccgtattgcacacgacggttggcttgccgagtacgttaactcctgatttaatcgccgcgacgagcgcattagtgtcggtcacatcagcaatttcatagcgcagggctgacgtcgttactagcgctgatggctgtgattgccgatcaatggcaatcacgtcagccccctgggctaggaaactctggacctgggctaagccaatcccggaggcagctccagtaaccaagacagtctgtccacgatattcatcaaattgcattagtcaaccaactgccagtccgtcgctaaaatatcacaatctgttggtgaccacatactataggcttcatcggccgttttgattaaaaagtacgggttcagcgggtcgccgttgaaagtggttgccgtctgtaattcgacgaacaattcggtcccttcccaaccagtccgaacagcgcgcttaccagcttttaattcaggtaaaatagcttcaaatgtcatcatgatacctccaattattaatacccaaatcgtatcataatcccgcgtggagtgacaggcaaaaattggtaccaacaaattgtctattttactggtacggaccaattatttgtgcgataatgtaagcgaatacagaaactaattattatttggaggaattttaaatgagtaaactcggtgtttccgtttatcccgaacgatcaacctttgaaaaggatgcggcatacctcgatttagccgcaaaatatggctatcaacgggtattcacttcactgcttgaaatcaaaggggaccaagccgcagtggttgccaactttaaaaaagtgatcacttacgcgaaccaattagacttgcaagtaatggtcgacgtcaatcctgacctcttcaaacaacttggcgtgtcctatgacgacttgtcattcttccacgacctcggtgcctggggtgtccgcctcgacctaggattcactggtcaagaagaagcccggatgacgcacaacgaattcggcattaagattgaagtcaacatgtccaaagggactcactatgttgacacgattatggattattcacctgaaaaagataacttactaggctcacataacttctacccacaacaatacactggtcttggttatgattattttgttcagacttctgaacaataccgtcagtatggcatcaacaccgccgcgtttgtttcatcaaatgatgcgacttatgggccttggcccatgcaagacgggttatgtacccttgaagatcatcgggggttaccgattgcggcacaagttcaacatttgaaaatgacggggctgatcgacgacgttttaattggtaacgcctacgcgagtgaagccgaactaaaagcggctgctgaagtgttctttagtccttacccactgctacacgtcgaaaccgttgctgatctatcggcaattgaagaaaaagtactctttgcgcaaccacagacttatcgcggtgatttttcagattacgtcattcgttcttctcagacccgagtcatctacaaagacgaagcctttcctgctcatcacctagatgccattcataccggtgatgtcttgatcgataacgatgagtttgggcaatacaaaggtgaattgcagattgcacgccaaaatcttgaaaatactggccgaatcaatgtggttggtcatattactaagagtgacttaccttgccttaacttgctacaaccatgggccgactttaaatttgtcgctgccaaatagtactcaacgaatggaggggtcgcattaatgacaactgattaccgtttaactagcgatgctgaccgcgaagctttctaccaactttaccaatacgcgttcaataatcacgatacccccgcgcggcggcgatttttcatggatcgctaccaacatggctggatctacggccgtcacgatcatggtcaactggttagtgggctatacagtctgccactagcagtcaactttcatggcgtcacctaccggatgaatggtattggcgatgtgatgagtgcgcctgaatatgccggtcagggtggcgcgggacagttgctaacgacggcgctgacagaaatggcagccaaccacgtgacgctgtcctaccttgcccccttcgcgtacggttactatcgtcgttttggctatgaacacgtcttcgaccacgcgcaccaagtcatggccgctccagacctaccacgtgtcaaaccgacggactggtctggtacgatcacccgctatggcaatgacgggctggcccaaatcaacgatttttatgcacgacaaccgcaaaatcagcgtggtggtctgattcgaccagcctggtggcaacattacctgactctcaaacatcattggtcggtcgcaatttaccgcaatgcggctgccaatatcgagggctatttgatctatgaacggcaggccactaactttgcgattcaagaatgggtgactagcacgccgaccgctttcgaacgattggctaactttatcactaagcatggcaccacctttgaaacgtttagttatgatagcccaagtgcgaccaacggcttggacctactagccgacccataccgtttaaaagtgactgtccagccgtacatgatggcccgcattgttgatttatatgactttatcaagcgctatccgtttctcacggacatccaaccaattcgcctagcagtcagtgacgctaccctccctgctaatcaaggaatctggtcattgatgcggcacaacgggcaagtaacgctcaatcgggttagcgaccaattaactggaccggctgacattcagttaacgattcagcaattaaccactgcttgctttggcacccagagcttagcccgggcgtaccaacacggattaatcaccggtgatgtgaatgcaatcaaccgacttgacactagtctagttaaagaacgaccagcacttattgactacttctaagtgcttaatttagataagcagcatgactgactcaaagtgggccgccagaataatcattctggcggcccactttttgttcagacgctgactggtattgagatttgcatagattaagtcatttacgaatcagatggcaacagatactagcaccagtcgattaagctggagccgtgagcaaatcaacttaataataatgaattgccctcaaatcacggacctcattagtctccatgtttaagctaccttagcaaatacgttggttatttactcgacaggaatattccaacgcagtaggcttcaattgctattagaaagtgaggtcattattcgaataaatcacgttaatcatgatcatgctgtcgctatcactgcaacgccaacgacatttcccactaatacattaaacaaattatgccctattaccacgtgacctaaaccgaatttgctgaacacactgcaatctctaaaaaacaactgtcatttaccttgaaccgacgagccttcatgattatccttgtcgcccatcaaattaaaccagcaactagtttaaaagcacactgttgaatggcactggatttgaatatcgacttacaaactatcaaccataattcgaatccgatgtgattaaattcgaatgggcgactgcttaaatatgacagcaaccactatttttccaaaaagatctgtctctttcatttgagcaatcatgcttaatcttccagatatattcagaatcttcaccaactatacaaatacttaccggctacctgtttcatcatgactaggtgctgtctagcgaaaattgacaattcaattaaaaacattaaaattatattagattatccgtttttcatttctaatcaattcatactaccgaaaggaactcgccatggccatcaaacaacctgatttaaccatcaacattagtaatcatcaatctagcttgcaaatcttcaaagctgccgcaagtaatttcattagttcactaagcggtaaaatgttcacttttggccttggactcatgttactcgatgaaacacactctgccattagctttggtatcaacatgattatcagtccaattgttggcttgctttgccttgtcccaattggcaatctgattgatacttatccgcacaaaaccgttctcactggtagcctgactgcccgcacgcttgcactaattttattcgctgctagtatcaacttatttacggcaacagcaaaactcattccaatcgttctttttctaattatcgatgcaatttcgacaacccaaagtgcaatttctctttcctcgattctatcaccagcgttaggcgttggattatacagtttagtcggcttttctggcttcgttatattagagattgttgccacactcgcctcatttggcattatgctcacaatgaaatttcattatcacgcaactaatcaattcgctaattcacaacacgccccagtaacttcgcacagtcagtttgcaaaatttcattctggtctaaattacatgcggtcgcgaacaatgattaaaattacaattctgttgagtgttattctgaacttcttatatactgctgttacgattggaattccgtacatcttaaaagatcagcttcacacaggtaatggtcctattggcgtgcttgaaaccgggagcgcaattggtatgctacttggcagtctacttttaactttgctaccgccaaccggtcagaaacgtctctttttaaaattaattattccggtacttattcttgatagccaaatattgctattaggtgttctgttcatgacgtcccaatcaccaactggatatgccctgcttggtagctttatcatgggaatattggctttcgcgcttgttattcttaatataacttttcaggtctacttgcagcaaaccgtgccaactaaattactaggccgagtcgttgcaacattaacaacagtcaatagctcaatcatgccaatcggaacacttatgttcactttaatctttcaaagtaccactcatggcggtctcgtactaatcatcaacggaattctactacttgggtatacgttactgctgttgcggccattaaatcaggccattcatagtgaacagccatgagtcacgtatcatcaggcaattaacaatcccgattgcgatggaaaacgttgctttcgactttcaacgggctcaccaccgtgcttctatcacttcgagccctcataaaaccgccaataaacaaattattgattaacgaccgacataatacctaggaattataccagccaatgttacgatcaacatcacgaccaatcgttatgaacaactagcgcttttgcaacggcaaatagttattctattcaaaaaagatgtttgaagatccgactagatctccaaacatctttttactggcattatcctggttaatcaccagcatcgtgcgtaaataaaactaacgaatattaattgattaccaatgtaatattaaccatgtcttgacattaattttcatacaaataacccgcatcccgtaaagctgccttgatggctgttaattgttccggggtctgataagcaaccgtatggctatggacgccatctgttaattctgataataaatggccttgtaatttcttgagccggcccataaacagattaacatcaccaactgagcgaatctctaattcaccccggagccggccatacaatgggtgttcgacttcaacatccttgattatgccccctgcgtgaatgatcaaggccatttcctgcatcgcttcgtttggaaaatgacggcaaactaggacagcagttggctgatccgctttttctaattcatacccttgaagagtagcaacaatggccgttccgtgagccctcaataatgaaatatccccaacaatggtctgacgactaacgttaaactgcttcgctagcgttgttgcacttacggggacctgcgtttgcgataattttgatcgaatttgttcacgccgttctgatcctgtcatgactcacccttcttactctttcaatagaatcattctaccagaaaaccagtagaatagctttcatcaaatactaaattatgataaactaagttcatttatcataggtgtcaagacacctaaatcttaataacgggattgattagcaatgcgcaatttatctttattaaccgacttatacgaactctcaatggcaaatggatttcatcacgacttacctcagaccaacgccaccttcgaccttttttatcgccgggttcctgacaatggtagctttgtcattgcggccggcctccagcaagttgtcgaagctttacaagattttcattttaccaacagtgacctcgactacttccgtcaacttaacctatgggatgaatccttcttagccatgctggcaaattttaagttaacttgccaaattaaggcactaccagaaggaaccccggtctttcctcgtgaaccactattgacaattactggaccacttgagcaagcgcaattacttgaaacactcgtcttaaatatcgtcaatcaccaatcactgattgccactaaagctcgtcgactgagttatgctgcggcaggacgtccaattatggaattcggtgcgcgccgtgcgcaaggcccggacagcgcactttacggcacccgggcagccattattggtggcgccaatagtacttcaaacgttctcgctgcgaaactgtttgatattcccgttgctggtaccatggcccacagttggattgaagccttcccggatgaactaacggcgtttcgcaagtgggccgaacaatatcctgacaatagtgcgctactagtcgatacttatgatgtgcttaactctgggatccctaacgcggtgacggtctttaaggagctacgagcagctgggcatgaacccgtcggtattcgaatcgattcgggggacgtcacgactttatcacaagctgcccggacacaattggacgcggctggctttcccaatgccaaaatcactatttctaacgcattggatgaacacatcattacttcgctgttgcacgaaggcgcaccgatcgataattttggtatcggtgaaaagctcatcactagcgcgtccgcaccggttctaagtggcgtctacaagcttgcggcaactgagagcaatggtcagagcacccccaagatcaaggtcagtgccagtcgcgaaaaactaacgattcctggtgataagcaagtctatcgtctgtacgaaccaggaactcagcgggcctttgctgacttgattgcactagctaccgagacgatcgtcgatgcgaccagcctaaccgtcgtcaacagtgacccactcagtgtcgaccgccaacagcgactcacccattttgaagcccggcccttactcgcgccggtagatttgtccaacaccacgtcaattccggttacaaccattcaggcaacgacccaggctaaacttgccgagctcccacgaacaacccagcggctcgtcaacccagatctttacccggtctacatgacaaccacactcagccagttacaaactagtttgttgaataaaatgacgatactagcagattaacaaacgaacacgcgtagcaacgactaaagccacttctgatcagcgttcaaatgaccgcttaatacagaagtggctttagtttataacaagtaacagttagctcactgaccagtaatttgatcatgttcacccggggtcaatattttggtcatcaccgtaatcaaatacgcttgttcgcgctcaatttcagttcccggcaattccagcattaactgcgctaggtaaccgaatagctgcgataacaaactttgcagtatcaaatcattcggccaatccacaatcaaatgatctgcttttagttgatttatgacacttcccatctgcttgaccatcttaggcgcaatctggctaagaatctgttcgcgtcgttcggcgtcaaaagctaccatttcaaaaatgacctttaactctttcacgttagctttagcaaatgcaactcggtccgtaaaaattgctgtgacgaatgcctgtagactgggataacgctgccgtaattcatcctctgaaaaatcactcgctaaaattggcacaatgtgtgcggcaattggtgctaagatggcatcccgtaaggcagccttagtcttataccgccgatagaccgtcccctccgcaacgccggcccgttgtgcaatatcactagtactagtctggtcaaaacccttttcagcaaacaaatcgagacttgcctggaggatggcccgttgcttaggtgtaatcgtttcattctgacttagatcatgttgaaaataatcccgtatccgtggtcgttccatatcctcacaccttccgataacgtttcattccaacaatattcaacattgttagtacgaccataaaccctactaatattaacaaattgacaccaatatcgccaagcccagcaccctttgtcacaacagccgtcaacgcattagcaccatagtataacggcatgatgtgggcaattgcttgcaaccaactggccatgccatcgactggaaccaacccagcaaaaaagatttgtggtacaacaatcagtggaataaactgaatcatttgaaattctgagttagcaaaggtggaaataaagatacccaaggtcaaagccactaacgctaataataagttagtcagaaagaccagccaaatactaccaactaagtgaatcttgaagaccgtaattgcaaaaacaacggtcaggacagtctgaatgatggcaaagcccccataaccaattagatagcccataataatttcactccgtcgaattggagttgcaagtagccggcttagggttccagtagtgcgctcattcaaaagtgaaacgccagaaatcaagaacacaaagaagaagacaaagaaaccgagaaagattggcaaaaagttttcaaagaacgttgaatcactactaccataaatataatgactgctagtggtataggtcgtcgtttgtgattgactatttgttggcgccgcagcactcgctgtagcctgcctcaattgcttttgaattttagccgccgcagcagtattcccacttgcctgtgcttggaccaaggccgtctttagcttgctaaccgttgcctgtttttgcgccgcggtcaacttttgtagtgccacctgttgcgtttgcaacacctttttttgtgctttagtagccgtgaccaacgtttgaatttttaatttgaccagtccgctttgcaaagaagctttgatcaatgacgtattggtcggattactattagaatacgtgatcgttaagttgccatctttttgcgtcaaatatccatccaaatcatgctgcttaatcatcgcttttgcctggttactactgtaatggtgaatatcgacatgcttcgtattaatggctttgaccacctgatgatcaacattgtgaacacctaaagtcgccacttgagtcgtgttattttgaaacaaaaaatacatcaacgccataattaagagtggtgccaaaaacatcagcgccaaggtacgcttatcacgtaacatttgcttaaaaactcgtctaacgattgccatcattcgcatcttgcatccgccccgctttcaaaaagacctgttcgatcgtatctactgcatactgttgtttcagtgctgcgggtgtcccctcagcaagcgcaatcccgtgccgaatcaacatgagataatcacaccgttctgcttcgtccatgacatgcgttgtcacgagcatcgacttaccggtatccttgagcttatttagttcggtccaaatttgttgccgtaattctggatcaatcccaacggtcggttcatctaaaatcaataattggggatcctgaatcagggcaattgccaacgacaagcgccgtttcatcccacccgaatagccactgacccgcttgtctaattgggacgttaaatcaactaatccggctgcataatcaatcatttgtgctaactttatttttggaacgctcattaattgcccaaaaaaggtcaggttttcacgggccgttagtgtctcatacaaggcgtcactttgggccatataccctacttgtgccattaccgccctattgggcatcaccgtatccataactttaacagtgccactatccacagcttccatccctaaaatactcttgatcaaggtggtcttcccagctcccgatggcccaatcaagccataaatcattccagccggcagtgtcaaatcaatctgattaagcacttgctgatgaccaaagtgcttgctgacctgcttggcgatgacataatccgttgccattttaataaccctctttctcgaagtgagtgtatactcactcacttaatggctttagtataatcagtacatctcggtttgtcaacacaaaaatgagttgtcactcacttactttatttccagcccatttgtcaccgcactgcaaacaaaaatgcgccaccccgttgttgggatgtcgcattttaattaaatatcagcactgatataagcgttagcaatgttttaacgattgttaatcttggtcagcaatttttgtcctagctcataatccaactgacgctccgattccggcatcatgtcgccgccagttgcccagacaatgtgggtgacgtctttgccagcaagcgtgggaaattgggccatgatgggggcgatcgcggtaaagccggctgcagcggatggttcgaccattacatcttcggtatcgacgagcttcgtcaaataacgatataaatcatcatcttcaaatgttgctgttccgagtaatagcgtttgcatcaccttgcctgccaaccgtgatggccggctaacggctaacccatcagcggcagtcaggccatctaaaccaatgtcttgaacagcaattttttcattcagcttggtcatcatccctaaggtcacggacggcacgtgggtcggttcacaaaagacggggtaaatattggctcccataatcatcttgaggccaaaagcgacgccactaggactgccaccgaccccggccggtaaataaacgacaaccgggtgcgcagcatccatcttgatgccttgtacttttaattgatgttgtaaccgtaccccagcaacagcgtacccgaggaataagtcacgtgaaccttcatcatcaacaaagtgcgtatggtcatccttggccgcggcggcacgggccaccggaatcacacttgaaaagtcggtatttagttcctcaacggtgacgccatttgcccgcagtttgtccttcttccactgacgagcatcgtgagacatataaacggtcgtcttaaatccaaacgttgcggccatgatgcccacactgagtgccaagtttcccgtcgatgcaacgatgacgccgtattgtgcaaataactcgtgatacttagccgttgccaagacactgtaatcatccatatacgttaaatccgtatgggccatggctacctgttcagcaaacttgagcacttcgtaaatcccaccacgtgacttgatcgaacccgaaatcggcaactgactatcagcttttaaataaagctgccccgccaatgactggtggttgagagcctcccatgctggtttcatctgctcaagtggtaacaatggtgactcaataatcccattcatagctgccgtttctggaaaagcaacggccaaaaatggtgcgaaacgttcccaacgtgcgaccgcgtcaaaaatatcggcccgcgttaacggcaggtccgcccgcttcccataatctgggttctgccaaacaattggtcgttttgccatcaattccttaatctgtgggtgttcttcaatcattaccgttgtatccatactttcaggtccttttcatttaattgcatcatattacgtatcgtgagttaaaattatcagttttcgatggccgtctgcatgcgttcagcctattccgaccttccgagactaggtaacatactgaaacgtcaccacgatcagcacaaatgccgataagtcgatataacacgcactgagccaacaagcctcccccaacccgaccctttcaaccgaacctaagttagtggcttttctctgaatctaacgatttttaatcacaactcatgttagataatatgacatcaccttcgtccatcatttaaccatatttgatacttagaaacaatctttaggcactgattaacaataattgttgattagccaatcaaacaagctaataaggcaatcgaaaaacgacgttcaaagttcactcactttgaacgtcgtcttcaattagtggttattaattgactaataatcgtcgttcgaactgcataatcattcagtagtcttctagcacaacgagtttcctacttcaaatcggccccattcgtccgaatcactttttgataccagtagaacgaatccttcttcgagcgctctagtgtcccgttaccttcatcgtccttgtcgacgtagataaaaccgtaacgtttcgacatctgaccagttccagctgagaccaaatcgatacacccccacggcgtatagccaatcaagtcgaccccatcttcggtaacggccttgatcatttcactgatatgagcgcgtaaatagtcaatccggtaaggatcatgaatactaccatcggcttcgactttgtcgcgggcacccaacccattctcaacaatcatcattggcttgtgatagcggtcttgtaaccaattcaaagaataccgcaaaccttctggatcgattggccagtcccattcgctcgtcttcaaatatggattatcaacggcttcggtcccgacaaagtggtaacttgggttatcatcctgagcggcgaccgtgttggaattatagtaactaaagccaatataatcaacggtgccttccttcaagacttggcggtcttcggccgtgatatcagggcggaaaccagtctgtttgaagtaagcttccatattatttggataatagccccatgactgtacgtctgcaaaccaataacgccgctgcatagccttttcagcttgcatgatatcttgtggcttagcagttgcaggataaatcggtgtcatgttgatcatattgccaatctggaagtcgggattaatggcatggccaatcttaacggctagcgcactggcaacgacttcataatgagcagcttgatacatcaacgcttcagcgtcaggatcatcgggcttcaacactaaaccagaatccgtcgccatcaggaattggttcgtataagtcgtctgattattaatttcattgaaggtcatccagtacttaaccttgttcttatagcgcttgaagaccgtttcagcatagtgcacaaaaaagtcaataactttccgcgaacgccagccaccatattccttaactaagtggtacggcatttcaaagtgggccagcgtgatcactggttcgataccatattgccggcaagtatcgaacatatcatcatagaacttcaaacccacttcattgggttcttcttcatcaccatttggaaaaatccgcgtccaggcgatcgatgtccgaaaacacttgaagcccatctcagcaaatagcttgatatcttccttatagtgaccataaaagtcgatgccttcatggttcgggtaattcttacccgcaatcacaccatccgtgatttcacgaggaacaccgttggcaccggcagtcatgacatcagccacactgacccctttgccaccagcttgccagccgccttctagttgatgggctgcgaccgccccaccccataagaaatcagatcgtaaaccactcgttgttgccatgcattatcatcctttcactataaatctttaccatcactcgcaataacttgttggaaccagttaaaggagtctttcttagaacggtcaaaactgccttgaccattatcatcggcgtcaacataaatgaatccataccgtttcgccatttcaccagtacttgctgagaccaaatcaatacagccccacggtgtatagccaatcagatcaacaccatctaatacgaccgcttgttccatcgccaagatgtgatcacggaagtaactgatccggtagtcgtcatgtacactcccgtcggcttccttcttatcgtaagcaccaaagccattttcaacaatgaattgtggtaagtgccaccgatcttgcatccagttcatcgcatagcgcaacccagttggatcaatttgccagccccaatcagacttctcaacgtaggggttctcaacaaagtcatcgggttccttgaaatcgtaatcactgtcaccgtcacgaccctttgtaacaaatgacatgtaataactgaaaccaacgtaatccaccgtaccagcctttaaagttgccaagtcagcagcggtaatatccatatcgaagcccttgcgttcaaagtacttcggtaaccactttggatattcaccgagacagtggacatccccgaaccaataccgtttttgcatggcccgttccgccatcatcacatccgctggtttagctgttagtggatagattggacacatcgcgaccatacagccgatttgaaaatcaggattgattgcgtggcccgcttgcacagctagggcactcgctactaattcataatgagctgcttgatacatcgcctgttcccaattgtcatccttgctaagttgcaggccggaattttgtaacaatgggtgcggatcactccaagctgtttggttattgatttcgttgaaggtcatccaatacttgaccttatcctgatagcgcttgaagacggtcttcgcaaaatgaacaaagaagtcgatcatcttacggttgctgaaaccaccataaaccttcactaagtggtatggaatttcaaagtgtgacagggtcacaacgggttggatgccatgcgataataaatcatcgaataagtcatcgtaaaacttcaaaccagcttcgttaggctcgctctcatcaccattcgggaaaatccgggtccacgcgattgacgtccggaaacacttaaagcccatttcttcaaataatcgatcatcttctggatagcgatgataaaaatcattgccccagtgattaggatagatttcaccatctttgacgccatccgtgactttacggggaaccccgttacgtccggctgtcattacatcggcaatgctaacgcccttgccatcaacatcccaagcgccttctaattgatgggccgcgaccgcgccaccccacagaaaatctttgggcattttgtatccttttgtcatgaactaattccctccattaatgctgctcaggctatccctgagttacagtctttgttaccttaactaacgaaaagcgtgtaaccgccacgtcaccgttgttaagctgtctgccattataagcgaccacggcatgaatgaaaaaacaagcccagaccaacaccagcaggtatttgcctaggctcaaattaattaactacttcgcctcatcggcagctaaacgccgataaacgtctacaacttcaccagctaagtcgcggaaggtgatggcattcatgatgtgatcttgtgaatgtactaataacaatgacacgtgggtatgttccccttgtgcttccgccgttaacattgaggtttgtgaattgtgtgcttcggttagaaagttatctgcttcctttaacttggcatcagcggtttcaaagtcgccttccttagcagctttaattgcttcgaaagcggaactctttgcattaccaccattaacgatcaaacccataatggtttcgagacttgcttcaacttcttttgtttgttcttctgccatttaccctcatccttttagcatttattcgtgtgcatcacaatcaaaatgccaccggccgcgattgatctaccgtgggctggtagcacttacaatttaatgattagtttgcttttgcaattgatgcttcggcttcctttaaaactttttcgccgttcatcatgccgtagtcttgcatgttgataacttcaactggaatatcaacgcgcttttggaaatcacttaacatataacgaacttgtggtccaagcattaaaatgtcaggattcttttcagctaacttcgcatcagcgtcactggcagcggttgcaaaaatatctgcatcaatgccttctgcttccgcagccttttgcatctttgagactaataatgacgttgacatcccagcggcacataccaacataattgttctttcagccataataaacacgctcctagattgttttaaatttatatgttacagcggttgctttaataaaccgctttcattacaattagaattataagtcatgggtacaaatttgacaagccttattaatcagatatctgcaatttatttgatttgtacccacaaattattaaataacaacttaatattcgaaagaagtgaacaccatgtatcgtgacattgcaaccaaactcgttgccgccattcaagacggcatttttaccgtcaaactccccacggaagcccaattaatggaacgttaccaagctagccgcaacaccattcgcaaagcgattgacttggtgtaccagcaggggctcctgcgtcgggttcaaggcagtggctattatattactaatattcagcttcaacataaaacggtagtgaatctgtcagcacgctcactcttcaatagtcatgtccacccacggactttaacttccaagattctgacttttgatacgatccacggcgatagtgccctgagccgcaaactcaacattcccgtcgacgaagaactgtatcgtatcattcgcctccgctattggcacgaccaactgtattgtttggaaaaggcctactacttacgctctgtcgtcccctatctatcgaccgaagctgtcaatacgtcaatttgggacttcatcaacgaagcttacggcatcgggattgctaacagtgatgattatctttcactcaccaatcttaacaaggaagaggccgaactaatgaatttggcacagggcgcaactcacttggccttggattcttgtaactattataagaataatggcttactagatttttctcacaccatctttgtttatcccgaccttgcattgtattttcatacgacaaatcttgcaaataattaatttatggctaaaaaaagacgattcactataatttcatcacaatttatgggtatactagtaacagtatccaaatttacgatggaggaattagcgtgtcagcaccccttttttcagtggttgtaccagcttacaaccagcacaaatttatagatagctgcttgactagtctacaacgccaaaccttgacagactttgaagtcttcgtggttgatgattgttcgactgatgacactggtgaacagattgccgcgttaatcaaaggcgacgaccggttccacgtgatcactcacgcccataaccggggcgtctccgcagctcgtaactccggtatggctgctgctaagggtaagtacctttgctttgtcgatggcgacgattgggtcgaaccagactttctggcaaccttcctagccgcctaccggtcagcacccgatacccagctcgttgtatgcggtcactacggttacttagccgttccgagtcctgccaaaacatacaaccaaaaagacttgattgccaacatcaactttggcacggttggcggtttttcgtggaataaagcattcattcgcagtattattaccacgcatcacctcaagttcaacgaagatattgattttcttgaagaccagttgtttgcctttcgttacgctaactacgtacagtcctccgaatacgtaccggaccggacttaccattaccgttggcgttttcgaagcaaccttgctcacattggaattccattcttcaccgctcgtcgtaagatgatgaagattctcaagcaggaaaacaagcaagttttgaacgaagattggaataatcagtagcaacgttacgttgccatcgcctctaaaggtcggtagctgaaatagctatcaccctttaggggattttttgatacctagcataatcggctacgatgaccagaagatgcgcaattattcgaggctagtagccatccactcgcagcctcaaatgcgctttcgccgccgattaaaccgaccgtggcgcgaaacaagctagctgctcaagctctttttgatatcagcgacaaaataaagtggcaattaacaattaaagacttgttgaatgacgagtaacgctttacaattggactatattaattaatttgatgggagggttagcgatggctacgattcacttatacttagtccgtcatggacaaaccaagctcaacgcggccggccgtttacaaggcatctatgattcggaactcacacataccggtgtgcgctccgctcaacggttagcccgcatgctagcagatgttcatttcgacgctgcttacgtcagtgacttgggccgagcacaacaaacgagtcgcattatcaccgcactccatcctgaaataaaaaagccgacgattgacgtcggcttacgcgaatttaacttcggtgggcttgaaggtaccagaaacatgtggatcgtcaagcaagtccaaaaacaattgggtattggaacgtttgttaagttgatgttgagtcgtgaacgcttcgccaccctactatgggtctttaactccctcgaccagactcgtggcgccgagactttggtcggtgtcacggatcgaatcagtagcgcgctacgacgaatctgtttgtatgaatctcaggatagtcagcatgacaagaatattcttatcgtttctcacgggctggttctcagtgcattcctataccaaatcagcccccgtgagcttcccacccgactcctgaaaaatacaagtgttagtcgcgtggactacaaaaatcggcaattcaagttgatcgacattaatatcacccctaagaagcgggcctagttgtctcgatgctaacaggttgcgtggtacaactcggaaattgcaagcgcgcctgaataccaaaaaaggctttgattttgcgttgtaattcttgaccagttgcatgcactgaagcttcacttgcatctggatcgccaactacaattaaaatgcgactgcttttactatccaaattaggcctgattggggtggtagcatccgctgaaagactggccccctgtgccgttaaatgaagctgaacctgctcagtgccaagcgtattcatatcccacgcattgatctgcactggatggcgcgcgtgaatcacttgaagcaagtctgccaaagcattctgcggctgagcaacggcaagcccttgtgcagctaattgtttttcaattgctggattcaactcacggttatcaagattgctcatcgacaaaattgctaatggaatttccgtggtagtcgtcggtaaaatttcaattttcaacagttatcacttcctaaaaacacttcaatactaagtgtgccaaatttgacgtaaaagtcaattaccaccacttaagtcatagcaaaattttaataataccacaaaagcgattcccacacacgtgagaatcgcttttttaatggccttattgtcctcgtcgatacaccgatacgcttgtaagctgaccttacttagtcgttgataatgggtgggccgcgaagtatttttctaagaatagtgccaaaccatcattataattcatatcagttacatagttcgcaactttcttaacttgtggcaaggcgttgcccattgccaccgataagtcagcttctgccatcatcccaacgtcattcaagccatccccaaagacaaacgtgtgggcggcatcgacatgttgctcacgttgaatttgtttgaccgccgtccccttatccgtattcagaggaatcatctcaatattattcgggttcgatgatgaaagtcgcaacaatttactattagtgagcttttcgcgggcagaatccagccgtgacatgtcttcacgactgagaatgacgccgttcgtaatctggtcctcaatcgtggctaattgcgtaaagctcttcacttcttcatagccaatcgagacttcatccgcatcaaagttggccgcattacgagcaacgaaccgcggaatttgttccgtatagtaggccatgtctggcgtgaacaacatcattggtaagttatcacgacgcgcaatcagataggcaagctcaaccgcagcacccccgagtttggttagctcacggccctgggcaccatcgaacaccgccccattagatgtcaccaaacgaacgtcagcgtttactttgtctcgaacgatcttcgccagctcgtacatgcgccccgtagcgatgtaaaataacacgtcctgcttctgaaaccgttcaatcgtcgctcgagttcgctccgagacatattggtgatccgttaataatgttccgtcaatgtccataaagactaaatattttggcatagttgaactcctcctacgtatttacctatatgttgtgctagctaactgatcatctgtgacattcagcttgactgcttttgcttggtttgccaatcagtcggtaccatcctgccatcgtcagtaaatacgcaaattggcgtatccgcactgatgagtaagccggttggccggacttgaatgggcttaaattaaaaagatgacgcaccgccgccttttttagcaatcataattagcacaaggcttatttacactcccaattgtacgctattccctcctataatggaaatcgctttcaaaaccgaactagccaccgcattttcaccacgtaaggctaaacaatcttaagtttagaagctatttagagcattatttgccctcatcagctttatataccaaagaattcaatctcactacttgacattcactagtctagccgctaaattagagagcaattaataaatgatgataaaaagcattgaacagttcagtagttgccggtcgttagccttagcgagtctgagatggtgtgagcagacctaatccggtatcacgaatatcgactgtgagttgtatgggtgaaatcaagtaacccgtactggttaacacccactaacgtgtagtacatctttcatgatgtgcttaaggtcagtaatgtaaattgctgatgaataccggtggtaacccgcgctcgcgtccggcagacgacttcgtctgtcggacgtttttattttcatttattaataaatcattttaaaggatggtcatacatatgcattttacagtactcggcgcaggcgccatgggattacgttacggtgtgttattacaagaagcaggcaatcaagttgattttgtggatacttggcaagcaaatgttgatcaaattcatcgtcaaggtggcgtctacgtgtcgcgcgatcaccagaatcgacacttagttcccgtcaaagtctcaactcccgaagattataacgacgatcccgacgtgtgggtcgtatttactaaacagatgcaacttgctgattttttgactcggacggcccacgcttttaatggtcgccagtacgtgctcacttgcatgaatgggatgggtcacgttgcaaaattattacactacttcaaacccgaaaaattattagctgggaccgcactagtcgctacggtcttaaacggccctggtgatgtcgacttcattggagctcgcggcgccggcaccatgaatctcgccaattatacggaacaccctgacgaaatgacccaccgaatcgtgacagaattagataaatgccaattccaccctaatttaacaacgaacttccgcggcaccttgctggctaaagtcgtcttcaactcagtggtcaacaccctctgtaccctctttgaaattacgatgggcgaattcgcggcctatccaggggctgatgagctgagtcgtcaattgatcgatgaagcctatgatgtctgtgagcgtgatggtgtcaccatgttgaatacccgcgcggaagagctcgcctctgtcaactacgtcagcaaagtggctaatcccctccactacccatcgatgtatcaagatatgtctcataatcggccaactgaagtcgactatatcaatggctacctcgtcaagctcggccaaaagtaccattaccaagcaaaaacgcacgcgtttctgacccatctggttcacttagccgaaaccacccgccaaaccagtgccacaactgaacacactactgaacaaaatgctcagaacgcgaccgaacaggctagtcaacaagcaagtgcgtaaccgattccccttttctcagcaaaatcatgtacaatggagattaagttgattttactgaggaggcggtttgctgtgcaagtcagtcgggaattcaaaggtatctttcttgctagtatcagtgcgaccttctgggggatttccggagccgtcgcacaaacactttttgatacgaccgatattaattctatttggttaacgggaattcgcatgctgggtgccggaatcgcactattactggtcagtttgcttacccatgttgatttgtggtcgatttggcgtcaaccccgcgatctcctacagatcgtggcctacacactattgggtctaatgccggttcagttcacctactttttagcagttgaagctagtaacgcggcgaccggaacaattctacaattcatgggacccgtgttcattgctctgtggatgctagtcgctcatcggcaattgccgacccgtgcagaaggccttgcaattatttgtgcactactgggctcattcttgctcgtgactcacggcaaccctcagaccctagtcatctccgtctgggcgttgatctggggactcttatcgggggtctcgtccgctacgaataccttgctaccaaccaaactacttactaagtacgacccaatgaccgtcaacacctggtcaatgttgttagggggtatcttgtttaacatcgttcagccagtctggtcaatccatattccactgactatgcttaatatcagcaagttgacctttgttgtgctgtttggaacattgttagctttcctattcttcttgcaaagtttgcaatatatccggccaaccgttgtcagtctactagacgcttttgaacctttatccgcaaccatcattgcggtggttctactcggtgtcagcttcggttggctcgacattctgggcagtgtcctgattattagtaccgtctttattttggctattgggcagggtcccaatgatcgcacggcagagaatttcaagcaaccataaacgatgactcataattatgaaaccagtaaaagccggttgtgactaagtcctagtcacaaccggcttttacattgccgctaccgttacatatattcaattaataaccacgattcagatccacttggttacgtaccagcgtgccatctttgacaaactgtgcaaagttcgccgcaaagattggaaaaacggtcgcccgaaagtgggcaatttgacctgaaatatgtggcgtaatcagcacgtcatctcgttgccacaacgggtggtccgtcggtaatggctctggttcagtaacgtccaacgctgccatactgagttgatgatgatccagggcggtcattaacgctgtagtatcaaccgccggaccacgcccaatattaatcagcatcggttgctgtttggtctgctgaaataattcagtactaaacaaatgatgcgttgttggcgttaatggcaaagcgttgacaataaagttagccgttgctaacgcgtcggccgtcgcggtaaatgccactgtttcatgaaaatgatcagcggggtgaccggtcgtattgaccccaatcacgtgcatgcctaacgcactagccttagccgctaacgattgcccaatttggcccgtgccatatatcaacaactgttgcccggtcaaggtagatgtcgtcattggcaaggcccattgccgtgccccgcgctgattcagccaggccgcatggtacccccggactacgcttaacatcgcggctaagaccgattcactaatcgcatcggcgtgaataccactcgtgttcgcaaccaccaccccggccgcttgcaatgcctttaatggcaaataatcgacgccagctgaaatgacctgtacaaactttaactgattggttggccgcgctaggatcgtctttaataacggatgattaccatacatgacttcaatttggtcgtaatcagccgccgtgaccgccgccgcatccttgaacgtccagtccggataagtggtttgtaactgttgcagctgttcaggtttggttgcttgagccatcaataccattggcataacttattaccccatttctaatttcttgatcaatacttttatcataccactatcattcacttgaaccgtaatgatccacaaccggatattagctaagattggccaataagttaggctgacccttttttagcccacagtttggtttaaatcacaatgtttgacgctactgctgacaaacggctcacaaaataccaacaaaaaagcgatgttcgaaagtcgcactcccgagcatcgccaatcggtaactaacctaattgggtttaatcgttgaccaattatttaacaaccgcaaagccaccggtccagccgatttgttcactggctgctaatgtcatttgcataaaccccatcgcttcaagctcacgggcccgctttaacttacctgcatccttcacttctaacggactgtcagccaaggcgcgggtgaagcgttgcttggcgctatcgtcattaccagcaactaacacggttgttggttccttaccattgacctgcccactctgaagcgtcgccgcaaaagtcgtattgaaagccttgagcacctgactatctggtagttgctgctgtaattcttgggcagccgaactatcagctggaacaaccaagtcatcccacgtgtcaaaattcaaggggttcgtgatatcaacgacgattttgcccttcaactgagtcgcgtactgtttagccagcgcagctaaagcgggataaggtaccgccatgatcacgatttcaccgagcgttgtggcttggtccttggaaccataataagtgacctcgtgcccagcgatttcaaaattatgaccaattgcttgccccatgttgcccttaccaaaaattgtgatttccatatcaaaacacgcctctttcgctttataattaattttatatttacattctaacattgatgtcccatttacatcacttttatgtctgacagttaccgcaaaccggtcgtcaatcgccctagctagtagtcgctccttgaatgacgacaattagtggaactaatggctaatcagctcggatattcacctgcctgcacgcttcccaggttattgacacgagtcgatcagtcactaacgaccaaaaaccgaccaacttaattatgaaactttaaaaatcaaaggcgtaagcaaatgggacgagaaaccaaaattcggtttctcgtcccatttgcttatacagaggctagttatgtcacagcctcttttacatagttaaacaagtaaaaataaaaaatgaaattaatgcttgcgttggagtgaacttcaaggtttatgatttcattattgattaacacaacaaggagtcgatatgatgaatacacaattaccgaagggccgcggcgcaatttctgacggcaaagatacaaacttaaatgaagcacctactcgtttcatcacaaagaacgctaaaactttagtgatctatttttctcggagtggtaatactgaatatcaagcaaagatcgcgcaaaaggtgcttcatgctgatagctatgaattaattgccaagaattcatatccaacggattacgatgcaacggtcagccgttcgaatcaagagcaagccggttcactgccacagttagtaactgatgatttacctaactttgatcagtatgatttgttactgcttggtagtccaatttggggtatgacacttgctaatccgatgcagaagttcttagaacaatttggtagtcaacttggtggtaaaaggattgctgaatttacgactaacgcaggatttggtgctggaaacgctcagcgagttttaaaagaactcgtacccgtttctgcgactattttgaacgattatacgattagagacactgaaattgaaaaaacaaatgaccagtttaaagactggcttcaacaaactgaggagaaataaattatgaaaaatgtattaatcttagctgctaacggacaaattgctcgaattgttgagcagcgaattttaactgaacccgcttttgatcaaattaatttaaccttatttttacgagatgcgtcccgtttatccaagtatgccaataattcacgcgttacgctaattgaaggcgacattaccgaaccgcaggctgttgaagatgcaatgcgcaatcaagacattgtttttgtcgcagtagttgatcatgatcctaaaaaccgaattactaataacgtgatcaacggaatgcgtgcaaataacgttaaacgggtcctttctactaacgtgttaggaatttaccaggaagttggtggtgaatttggccgttggaatgcgatgatgatcagtcatggtatggaaccagcaattgtttcagatcgtctattagatgcttctgggcttgactacaccactttaagattaccgtggctaaatgatcgtgacgaaattaaataccaaattacgggtaagaatgaggcttatgttggtgtttcaggatcacgtcaaagtattgctgatgcagttttacaaatcatcgcagatccaactaaatatagtcggacgagcattggattggctgatcctgataccgagggtcagggccgaccggtatattaaaacggagtttggttttattgataagcatagataacaaacttataatgacgacgattattggcgctatgtctttaatcggtgtcagtaagaaaggtggtttaatacatggttaagcgaacactaggtacgactagtccgttaacagttgatgcaattggtttagggtgcatgggcatgagttccgcttatgggaaccccaaaagtgaaaccgagatggttcaattattgcgaaaagcagttgaattaggtgaaacgacttttgacacggctgaggtttatggaccctttactaacgagctactattgggcaaagcttttaaggggtatcacgaccgtattaccatcgcaactaagggtggtatcaaggtcgttgatggaaagcaagttgtggatggtaatccacgcggtttagtggcctcggttgagggatcgctaaagcgattgcagttggatgcgattgatatgtattacctacatcgggttgatcccaaagtgccgattgaagaagttgcggaaacgatgggccaattaattaaagctgggaaaattaaacactggggactatcagaagctggtgttcaaacgattcgtaaggccaatgcgattcagccgctaacagccgttgaaagtgaatattcgctatggactcgcgaacctgaaagagagttgattcctactctagaggaactgggtatcggcttggtaccttttagcccattaggaaaaggatttttaactggaaagattgatgtcaatacgacttttgataaaaacgatggtcgtaacaagttacctcgttttcaaaaggatgctatggaagcaaatatggccttggtacacctattgcatcaggttgccgaaagtaagcaggcaacacctgcacaagttgcgttggcttggttattggcgcaacagccatggattgttcccattcctggtactactaaattatcaagattacaagaaaatatgggtgctgaaaaaatagtgttcagcccatcagaaatgaaaaatatcactatggctgctgatcaagtgcagattatgggtaatcgctatacaccggaacttgctaaacgagcgggattataaaaataattgcaaattacgcttgcgttgaagtgaactccaaggtttattctatattcatgttgttagtaaccgatacaaatttataggatcactcaaaaaaaacaaaaaagtgtttgcgttggagttcacttcaaggtttatgatttactcacttaagaaacatgtctaaaacatttaagaaatggagaatttaaattatgacgatgaaattacaagatgttgctgttgaagacttacctaaaattaacgataatccatggggattagtttaccaagatgcaattactaaaaatgaacctggtaaagtgaacatccacccaatcagttatattttaaatggcttgaagattgcagctaatgtatataccccagctggttacgatccaaagaaaaaatacccggcattaacggtggctcatccaaatggtggtgttaaagaacaagttgctggtttatttgctcaacgtttagccgagaatgggtacattgccattgctgccgatgcttctttccaaggcgcgtccgagggtaccccacgcatggtagataacccagcttaccgggttgaggacattcacggtatggccgatgccttatctcttttcccaggtgttgattatgatcgcatggccgcttttggtatctgtggtggtggtggttacaccttacgtgctggccaaactgacaaacgctttaaggttgttgccacgttatctgcatttaactcaggactagttcgtcggaatggttttatggattctgaagcaaatacgattcaggaacgtctccaaaaggcctccgatgctcgtgaaaaagaagttaggggtgaaggtgttgactataccgctgatttgaaaaaattaacacccgaagaagctgctaagttgccatacgatttgtaccgcgaaggctatgactattatgcccaaacacacgcacatccaaagtcaacctttgtttacactcaaagtagtttcatgaacttaatgacttttgatgcttctgtaaatatggaccttattaatgttcctttactgatgatggctggttcacaggcagatacgttctacttgaccgagaaagcttatgccaatgcaaccgggacttcggacaaggaactgttcttaattccaggtgcacatcacattgaaacttactggaaacccgaatatgtcgaacaagaactcagcaaattgttggacttcttaagtactcgactttaatcacaaaaagtaaattagtttttgaaggcttacaaggtcacgccttgtggccttttattttaagaaaggaatggcctggttcaccatgaatttgtcttaatgacagattctaatggtactaatcagtccctagacaggagtacggtaaattatgaagaaaatcattattacggctgggacacttatactagttggtgtggcaatattaattggtgtattgttgtatggttctcaaaagtcagcaaataaatcacgccaattgattatttacttcacgctctccggtaacaccaaaaaagccgccgaggcattacaacaagatacggacgctgatattattcggcttcgccctaaaaaagcatacccaacaacgtatgatgcagccgttaaagttgccaaaaaggaattagcaaccaagacgcacccggcaattgctaccgcaattctcaatttggaacagtataaaactatttatgttggatttcccacttggtggcggcaaccaccgatgattattcacacattatttgacaccgtaaactttaaaaataagacgattgttccttttacaactagcatggaatccccgattagcagctcggtgccgtatctacaaaagatggcagacaaagatggtgctaaactagttaaaggaattagatacacgaataacaacaatttaaaacgatttttaataaccaacgatttaataacaaaatagaaataggtgaaaacgatgaatattaatggtgtcagtaaagaatttaatgtttctaaagacacgctccgttactgggaaagggttggcttattgcctgaaattaagcgaaatgccagtggttaccgagactattcagaacgggatctaaattgggtttattacattcaggttttgcgtaatggcggcatgtcaattgaatcattaattgagtttgtgaagttgtatcgtgaaggaaatgcctcgaatgatgtccgcaaaagtttacttgttgaccaacgtgatactatgcttgaagagattgctaacctacagaaaacagttgattacttacaatataaaattgatcacttcgaagaccatacgttgaactacgagaaggaaaaattggcgttagatgataagtagtatttgggttgtcgttgtccaatatctctttttctattagaaaaggtgcccgtctattgttgaaatagcgggcatttttaatataactatgactaagatatagttagaaaagctcaccaaaaagaatgtgtgttcgtataatggaggtataaaggttggtgagtttatggaaaacattgttccccgcgaaaagtggctttacaacgatcgtggcatgatgaattggatggggtggattttggctgaccatagtgcgtaccttgaaagcgagcaaaaacatcagcaaattaatccggttaaacctgagatgacgattgctgaaatcaatcgactactgcaatcgaattggcaacagcgcatggccattacgatacagttaaacgttatccggcaggattggtacgcaccagccgttactggcaccgtagtgggctttaacgacgagtgcacatacctccaactcacagatggcgcgttaaaggctgttaaagtgcagacgattcgcaacgtttcactagcagataggacgaagtggtggttatatgacgactccatttgatgatccgagccgcttacccgttcgggacattatgtgtattgattgtaaaagcttttttgcgagtaccgaagcaattcgtcgcggtgaatacccgttggctgctaaaattgccgttttatcccgtgaagaatttaatggtgggcttattttggcagcctctcctgatactaaacgggactacggcgttaaattgggaaccaggaaatacgaaattcgaccagaaatggatattgaattagcatcaccacacatgggtgattatatccgactgaattatcgtattagtcaaattgttcagcagtttactgacgaacaacactgttttatttatagtgtggatgaaatgtttgctgatataacgcattcccatgccctgtatgggtctaatgatgaaattgcggccagattacaggataaagtatttcaggaaaccggcattgtcacaactgtcggcatgggccctaatccgctaatggctaaattagccttagataacgcagctaaagtacaagctccgtggcgtgcgtattggggttatgacgatgttccggagacgctttggaaaattgataatttgaccaacttttggtcgattggtgctaaaacagccgctaaattagaaaaaatgggtattcactcaatttatgatttggcccatgctgatcggcagcagatcaaacgaaaattcggtgtattgggcgatgccttgtattttcatagtattactctgacttagccaagcggtatgtcccacgtagcgataaccgtggctatggtaatagtcaggttttgatgcgtgattatcgaaccacggacgatattgaaacggtattatttgaaattgctgatcaggtagccacttgtttgcgtaaacaccacgttcttggagaagtaatcggactttctgttggcttttcagaaccagatgaacgtggacgtaatggctggtcagcgcaaacaaaagtggatcccaccaatgaaactaacgacttaattcgtgcagtacggtacttgtttgaatcgcggtggcaaggtaacgcacttcgtaatttaggagttcgagtaaaccgaattagtaagccgaccacctttcagacttcactttttgccgatgaaaaagtacacgaagctagaacgcactattgatcaaattcgcgctcattacggctataaagcgattgtacgtggttccagtaaaaagttctctgggactgcaattgaccgtttatacttatttggtgaacgggtgcctttttggggcttaagtctaatttgaaacttgcaattatttgttaacggatactggtattcaacccgattttaatttataattagtcaaaagaacatatgttcttttaacgacaaattattgagtcaggtttcatccaaaagtgagtatcatgggggcgagcgacatgcggctatcgttaaaattcgatcagcagcatgagatttattttggattaccagcaaaatgttaaggtgaacaacgactgcgattgtgtcgattaattggaagggagtcattatattgatggaacagcgaacatacatggcaattgatttaaaatcattctatgcctcagtcgaatgcgttgctcatcaactcgacccattgaatgccaatttggttgtcgctgatacgagtcgcactgataagacgatttgtttggcggtttcgccagcactaaagcaatttggtgttccagggcggccccggttatttcaagttgaacaacgggtcgcaactttaaatcgcgcccgtggtcgccagacttcctatcaggcggttcggcggcatcgctcaatttatcgtgatcagctcctcaaacatgctaatttgggtatcgattatcgggtcgttcccccacgaatgagttattacatgcagaagagtgctgcgatttatgatatctatttgcgcttcattaagccggaacacattcacgtgtactcgattgatgaagtcttcatggacgtcacagactacttaagtacttttcaggtttcaccgcacgcactggcaaagacgatgattcacgagattcaggccgagaccgggattacggcaacggctgggattggtgctaatctctacttagctaaggtggcgatggatattgttgccaagaagattcccgctgacgctgacggtgttcggattgcacagatggatgagcagcaatatcggcaatacttatgggcgcacgagccgttgactgatttttggcgagtcggtcatggctatgctaagcggttggcagccctggggctcaatacgatgggtgacattgcgcgttgttcactaggaaccttgtcggattctcataatgaagaacaattatatcgtgagtttggtaaaaacgcggaactgttaattgatcatgcgtggggctgtgagtcgacaacaattgctgacatcaaaaattaccatgctagcgaacatggtatatatgccagtcaagtgttgatgcgaccgtatacttatactgaagggcaagccgtgttacgcggcatggtgaataatttgacactcgaactggttgctcgccacgtggtgacagatcagttgggaattcgtattgattacgatgctaatgcttcatcagttggcacgcattatcagggtgcggtcaccgaagactactatggacgacaagtaccaaagcccgctcataccaaggtgacattagcgcaggcgagtgcttcacaacacgagctaggggctgcgtatcaacagctttatcaacaagttgttaatcgtcaattgatggttcgacgtgtgaccgttatggcgaaccatttggtcgacgaacagcaggttaggcgccaacctcggtatcaacaaactaacttatttgaaaatccagaagtggcccaagcgcaagaacgagacacacaacgccaacgtgaacgcgatgggcaattgcaacgcgccattttgaaattacaatgtcgttccgggaataagaatgtcgtcattcgcttggcagatctaaaaccgagttcaactacgattgaacgtaatgagcagattggggggcatcgtgcctaatgacaaaggaagccagtactactgcgttatttaatgatacgagtcgctatgcggatattttagagtgctcgcgacctacttcaaggcatttaccaatgccccaagcagaccgtgctgcccaatttgcgccgttcgcggcgttgactggttatcatgacttgattgaaaaacgcgctgcaatctatgcccataaacactatccaaatgctcaggataaacgagctgtggcaacccagttgaagcagattgcagcgttaacaaaccgtccattgctcaacgtcgattattttaacgataccgttggctattatcagacggtaaccagccagttggtgaagctcgattggcatcaagctcggatctatctagcggcaccaaccagtattgcgatggccaatatccgtagcgtttccatagcgaatcaatcctaataaaggacggctccaatgactaagattagtcgttagaaccgtccttttgagattaatgattatttatttcgcggtgatttgcatccgcccgtgctttttagaatgatacagattggcgtcgacgcgttgataaaaggccgttggtgattggtcatcagctgctaattctgataggccgaccgaaatcgacagctgaatctgatgatcattaactggtacggcgatatgattgatagccgcaaatagttgttcagcgaccgcaagtgcttcagttaaatcatagttgggaaagataacgttaaattcctcgccaccggttcgatacagtgcgatttgcggattgttggcacgacagacgatcgtagccacttgcgcgacgtgctgcagaattttgtcgccagccaagtgaccataggtgtcgttgacttgtttgaagtggtcgatgtcaaacatcagcatggtcaattgtgagccgtttttccgactgcttgtaacctgataattaatggctgttttgtaagctgcaaaattttcgattttggtcagagcgtcgtgattagcgaatgcaaccagattctgtttgaggtgtgcattggctgacaacatgctggcgtagatatagagtaaggaagcaaagacgagtaggtaggtccattcttgccaataagttgcccatgataagttgaacttaagcttcatgaaccaccagagaacggccccaaaaccagcacaagtgactaaataaagtgcgacttgtccctgtttcgtttggagtgggacgtgtttacgcaatcggccgagcgccgtaaagaagaggatcagtgtgacggcgtgtccccacgattcccagtagtacagagagtgattaaaacccataaagataaagacaagcggatacaagtaatagtagcggacgcgtacattgagaaagtagccacaaaaaatgagtgcgataagctggaaattcatgaaaatccaggcgtcgttctggcccacaacggcagcttgcatcccaaggacaaatatcatcatgtaaattaagccgtaccagtcagtaataacagattggtcaacccgccaatgatgggtgttgaagaagctaataatccaattttgtgagacccaaaaaagggtcagcacgcctaggatgaaaaaaacacttgtaataaatggagttatctcccaatgtgaccaagtcatacgcaaacacctttcaaatcgcaaaaactgcgttggttcgaattaaatgacgccggtataagtatatccctttaactgctaaatagcgactgtgattatggactttaattggctttttagccgttattatcaggaaaaatcagcgggtctcgcgctagatacgccgaacggcaattaaagcagcgcaacaagcctgggttaaggcttaaaatgtccgagttggtgcggtgagcgtgggggcagcatcgttgacgaaggccggggagtcgtcgtaataatacccagttggtcgggacgtgccgtaataaaaccggtgtttaccagccaagcattaatcgttaccggaccgacaaatttaaaaccaacttgttgtaagtgctgtgcgatgcgatcgccagtaattgttgtgcgcgggagttcatcataatactggggctggataattaattgttgatggcccaattgttgccagagatagtctttaaaagactgtgtggtccgaatttgttgaatcaggcgggcgttgtgaatcacggtttcgattttacgacggtttcgtatgatggccgaattgctgaggagattggtgatttgttctgggcgatacgctgccaccacctcaatttgccaggcgtcaaatgctgcgctgaatgctgagcgtttattgaacacgacggcccagttgagaccagcggcaaaaccgccaagactcagaaactcaaataattgttcatcgcgctgaagcgggataccccattcgtgttcaaagtaataccggtagccggcatcgtacggatagtaacgattgaatagtggatcatcatcaaaccagttggtaatcattaaacaagcctcatttccaaatcaattagtagacactaactaaatacggtaaatgggtcggaaaacatgtggataaaaaaacttttccaatcctcctgagaatggaaaagttaacttaaagcgtgttcaacgatgatctttgattacaaggttagttggcatgtggcgaacggttttcgtcgcgtggtcacgcttgatctgagctagaatggtcctcatactgactgtggcagtcaaatcttttttaaaagtatgcacaccaaagctgtcataagtgacctggtcatttttgagtgtgaaccagttcggctggagttgcttggcatctgccttaatgtgtttatcagaccaaaccagatacttagtttgcccctggtcagtgtaaatttcgacctgccaacccaagctgaaatcactaacttcttgccaacgctgaatctttaagtgcttgatcgcgtaataaataatgcagctgtattttaaagcaggctgtttagcaatggtcgtttcggtaatcggttgtggttgttggataacgcgtgatttgtgaaccgtagttgtggtggctcgcggggtgcggtgtaggttgcggtgtagggtgctgagaccaacaatggtaccgataataagaacagtgataatcggaatcagaatttttttcataagaaactcctaacgaataaaattgtaaaacgtaaatattactatttacaagaatggcatttattgctattctttaaaacgtaatgattactatttaaaaagggagtggcaattgtgaaacgtttgtggctattactaggtggacttgttattggtgggggcttgttaacgggctgtcagtctaagtcaacgactgctgaatcgcataaggtcaacattgttgcgacgacgaatttttatggtagtgtggcaaaagctgtcggtggcaagcacgtcagcgtgacgtcaattatcaacaaaccgtccgttgatccccatgattttgagccaacaccaaccgtggctaagatggttggtcaggctgatctcgtcatcgctaatggcatcggctatgatggctggatgaacaaggtcgtgcactcgacgcaacgggccaaattgattcgggtcggcgaggacgtgatgcatcgcaaggaaggggctaacgagcatctctggtatgacagtgcaacgatgcccgccaccgcgaactatctcgctaatcagttggctaaaaagcaaccccagtatcgcacgtattttaaggccaacgcccgcaagtacatcgccacgcttaagccgattcaacaggaacaggccaagttacgagcgaaggctaacaagttaaagaatcggcaagtgttagtcagtgagcccgtctttgattacgcattgaccagtttagggtttaaggttgctaatcaagactttgaaaatgcgattgagaagggcactgacccagcaccgcaagttatccacaagatgcagcaggcattaaagagtcggcaagtcgccttctttgtgaataacagccaagttagtgataaattagtgactaacatggtgtcattagccaagaagaatcaggtgccagtgttgaatgtgactgaaaccatgccagctaagttgacttatcaacagtggatgttgacacagtatcgccagctcaaccagttattgtccgattaagggacggacctgcaaggcgacgacgcccgattgcgcaacttggacgggggaatacaacgttagcatttcttgaaccatctgtgttaccggcgttcccggggcactgccgacttgaacggcggtgtattcgctcagtaaggattcaaaactagcgaaacgcgtgatgtcgatgagctgagtggtgagctgctggccagtcgtcagatcgatgaaatttacaatgtcaccgacttgtaaggcttggcgttttgcatcgtttaaacggatttcaattgttttgagccccgattttattaacagccattgtggatgaatcaattgcatggtggtcattgaacgtcctcctaatcagtttagtcttaattatagtggataactaacgaaataggggcctaaataatggcaatgatgtgcctgaacaccggatattagtggtaggtagctggcgcctgtctataattaggttaacaatacaagggggatggcacaattggcaaaacgaacagcgattccagttagattacaaatcgttggcacgatgagcgcgttaatcatcatgtatgcgtggggccgctcactaatcggccagccgttgcaattgggcaatcaacagtttacttggttagggttggtttacttgaccggcgcttttctattcttgttagtggccccatggctgaccaatcgcttagcgttgacgccgtttgacttcatagcgatgacggatcatctggcaatggggtggttggggtatcttatcctaattttagtcgttccgatatggtttcagccggccaattccgggcttacactcggcgtgctttccagtgtggttggtggaatttgtatggatgttccacagaatgtgacctggggtatccgggtaccctggacgtacaactcgccagtgatctggaagaaagtcaactggctgaccggactattgttattaatcgccagttacggcatggttggcatcggctgggtatggcccacactgttcccaatctatcaagtgagtgccattgtgggaattatcgtgattgcgttgggttatgcgcaccatttagcccacttgacgtaagttgtgttggtgattattaacacggcaaattgatatacgcggatcataattaggggtcgcgagtggcacaagtcacgttaatcgtggttagttgaagcgttgttaacaatcgttgaacggcaaaaaaggctggaaaattccagccttttttagtgtctttttaatagagggcccaggcttgcatgccttgtgcatagtacaagttaactgcggcgtcgatttgttgttgaacggaaccaccactaatatggatgttttgaaataaaccgtatgcaccacttgcaccgttaacgacgtgtggttgccagttagattcacgattgatgatgtgattccaagttccggcgtcaacaccagtccgtgcttgcatttgaccgagcacgtaactttgtaagttatcacccgaatagctttcagttgccggggtagttgctggtgccgaagcaaccgtctcgttagtttgtgctggtgttgtttgagtcgtagttgcggcctgtgtttcagctggctgggttggtgtggtgaccggtgcctgttgaactggcgctgaaacgaccggtgtcgctggtgcttgactagtaaggtcctgggcgttcgcccctggaatccgtaattgttggcctggtaaaattaaatggccgtgaatgttgttggctgtttcgattgattcgatcgtcgtcttatattcttgtgaaattgcccagacacagtcacccttcttaacggtgtaagttgcgtcggcgtgtgcagaaacagttccggccaatagtaggccaaccgttgcagcggatgttgttaagattgtggttaataattttttcaagttatactctcccatttttgtaagcaatcagcgtgtcgtacaattgttgatcaacaaaaattagtatagcggcgacttattactcgcatgtgtcgctaattttaagaagcgattgcgagattctgagaaaattatggggagcaaatattttactgaatagttgaagactatcgtgacgggacgtatcggtgacaatatatcggctactaatataaaaaatatgacagaaatagcaatataataattactgaaattaccgatagttgagccagttagcaaaaatagcggcaattacaatgtttaacgtgacattcccaatattaaatagttaataccggtattgttcttataagtttaaaagggtgttgattatagaaagtaatttaccgcaacaaaaaaagtcgggaaggattcccgactttgtcttaatagttttagattaaagggcccaagcagccataccttgtgcttcatataaagcaacggcagcgttaacttgttcttcaacagaaccactgctgatgtgcatgttctggaataacccgtaggcaccactagaactgttgcggacgtatggttgccagttggattcacgcgtaataatcgtgttccaagtcgaagctgagacaccagtccgtgattgcatctgacttaaaacgtaactcttcaaattgctaccagtgtagcttgaagtcgtggaatcagttgaacttgttgaagtggtcgtcgcggttgtgttgctagttgaactagaactagtcgttgaagcacttgaactcgttgtgtttgaagtcgttgacgaggtgttgttatcagaactggctgaactcgtcttaatagatagtttttgaccaggtaagatgtagtgacccttgatgttattagtcgtttcaacatgattgatagttgtgttgaatttttgtgcgatggcccaaacggaatcaccgctcttaacggtgtaagttgagtcggcgttagcattgaggacaccggcgaataataaaccagcggctgcagctgaggtagttacgattgtacttacaagttttttcaaattagacactcctataaattttgtgattatcgattaaataagttactgacaaaaatcttaactgcgatgtcattcgcaatcaacagaacccagtctaacgcctccgtgttacttgttagtgtcgcgagttttaagaacgcaatgcaaagattacaagaatacggacttttgtaatcttcgtaaccgaactgtgactttgaaaaaggctggttaaatcggttgataggggacagtgacaagctaagttaatcaagttgaggtttgcctaaaattaacattatgacgtgaaatcacccaaaattcagccataaaaaaagccgattattttagtataatcggcttttagtgcttgaaaatggtgtcaaacacggctatttaacagtttattccgtcactggaaatggatctgctaaaccgagggcttgtttttcagacttcgcttgagcaatttcctcttgcactaattcacgcgcgtgcggatcactatataggtttaatttgtaatccacttccttcagattcttcataatttgggcttgctgagcgagaatggcattgcggtgagtcgtcagcagttctcgtcgttgtgcaatcgattggggacctgccatgacataactgatatattggcgaatagcactgattgccataccggtatttttgaggcaaataatcgtatgtaatagatgaagatcgccgtctgtaaatgctcggtagccggattcattgcgactgacaaagggaagtaagccttgtttatcataaaaacgcaaggtgtacgcacttagtccgaccttatcagcgacttctttaatcgtataggtcaaaaagattcctcctaacacttgccttagagtattgtctaaggtttatattagctatattaacaagccatgatgaaaaaaacaaccaatattccgggggaattaaacatgaataaatcattagtattagtcactggcggtaatggcttcttagccagtcatatcattaaacaattattaacagcgggctatccggttcgggcaacgttacggtcgttagataaagcagctggtgtgaagcagacgctagcgggtacacctaacttagatcgattgacatttgttgctctggatctgacacaggatcagggttgggccgaagcaatgcgtgacgtgacgtatgtgatgagtgttgcggcaccagtatttgttaatcaaggtcaggcttctgatgaggtcactagtgcggccaaggtcggcacgatccgtgttctaaaggcagcgacggcggccggtgttaagcgggtcgtcatgactgccaaccttggtgccgttggcttcagtcgtttggatcatgatcatcccgtcactgaagtggactggacccgcgaagaccaaccggggctttcgttgtatgaaaagtcgaagttggttgctgaagaggctggctgggcgtattgcaaggcgcatgctgatagtccagaattcacgacggttaatgccggtgccatgcttgggccatcgcttaatgggcacgtcacgggtagttataatctagttagtcggatattaactgggcagatgatgccaaaccttaaagtcaatgtcatcgacgttcgcgatgtcgctgacttagaggttcgggcgatgacggcgcctgcagcggccaatcagcgttttctagcagtggccgccacaccaatctcgatgcgggacctcaaaacattgattcaagaacaacggccgcagttggctgcaggcctgacgaaacatttgattccagactggtttgtgcgggggttagccccatttagtgggcaattacgcgagtctagtttgatgatccgcatcaatcacgaggtcagtacccaaaaagcccagcaattgttagggtggcaagcgcgctcagctgatactgcggtattagccgctgtcgatacactggttaagaatggtttgaataaataggacgatcaaaacggtctagcagtagtatttactgccaggccgctttttgtagctactttagtggcaaccggacttagttattttaacaaaagtatatatttttaaaataaaagtattgattttgaaatagaaataggatagtattatttcacgaggaaagcgttttccaaaataaatgacacagaggaggagtttgatggataaggagcgacagatgcccaaggattttttctggggtaattcagtgtcaagtatgcaaactgagggtgcttgggatgaagacggtaagggccgttcagtttatgatgttcgtcctgcgacagcaaccacttcggattggcatgatgccattgatgaatatcatcgttacgaggaagatcttgatttgatgaaggacttacatttgaatatgtatcgaattcagatttcatggtcacgagtagttccagatggtgatggtgagtttaatgccgctgggattgcgttttatgatcggctggttgatgcgatgctggcacgggggattacaccgatgatttgcctgtatcactttgatatgccgttagccttagctgaaaatgaaaacgggttcatgtcgcgccacaccgttgatgcgttcgtccgttttggtgaaaagatgattgcccattttgctgatcgggttaaatattggatcgtgttcaatgaacataatttatactttaccgacgaagtcttcaacatttcagggtacaccaagggtgatcaaagtgttaacgacttataccggattttccaccatactatgttagcgcacgcgcgcctagatgactttgttcatcagaactacgatgacgtgaagattggtggtatgttagcttacaccccggtttatccagaaacagctaagccaattgatattatggcggctcgtaagagtgacgaatttttgaacaacaacttgaatgacgcttacgtgcacgggcattattcaccagaagtcctgcgttacgttgaacaacagggcatcgattatgatttgcaaccaggtgatgaagcaatcattggcaaaatgaaagcggattttttggcttttagttattatcgttcaacggttatcaacggggataaaatacccgttgatgccgttccgaatcgttatctcaattattcatttgaggccaaccgctttttacaagctaatgaatggggctgggcgattgatccactcggtttccgcaacttgattaccaagttgtatgaccagtacgaagtacccgtgttcccgattgaaaatgggattgggttacgcgagcactgggatggccagcatatgatcgaagatgatgagcggattacttatcatgaagaacatatcaaggcgatgaaagatgccatgttgatcgacggcgctaaggtactaggttatctcggctggggcttgattgatattccaagttcacacgcagatatcgaaaaacgttacggagttgtttacgttaaccggagtaatcatgatctaaaagacttaaagcgggttcccaagaagtcatattattggctgcaaggggtcctagcaaaaaatggagatgaattgtaatggaaaatagtagtaatggtgctgttagcaatttcattaacaacaaagttttaccgccaataatgaagttcgttaacactaaaccagttaaagccttacaagacgggatggtctacgccttaccatttattatcattgggtccgtattcttgatcttatctaatattccaattccagctgtggctgctgttattaaggcctctggttgggcagcgttctttaaccaggcctatacagtaacgtttggggttctttcactttgggcggccgttgggattgcctatgtgtatgtgcgtaacgaagggtatgaaccactgcccgctgggttaacttccatggccgtattcttacttttgcaaacgcttaacattgccaatccattagtagctgcgatgggtaaagccggtactgggattaccaatgctgctgggaatgtcgtgatgtcaggtagcgccgtttcacagaatatcgataaattaccaaaggtcctacaaaattttgtgcaagcacccgttactggggttgttaatattacctggctaggtggccaggggatgatcgctgccattattgtcggtatcttagttggttgggcttactccgctatgattcgtaaaggttggaagattaccctaccagaacaagtaccagccagtgttgccaaccaatttactgccatgattcctgccggggtcatcttgattgttgcaatgttaatctttgcggccttcagtgctttcggtaatactgacatgttgcaatttatttacaaggttcttcaaacaccgcttcaaggattatccgattcactcggtggtgcgctggttattgcgttcttagtgccattcttctggttctttggggtccatggtgggttgatcatgggtgccattactagtgggttactgattccgaacacgttcgacaatgcttcattatataaagcaggtaagttgaccgttgcccaaggtgcccacattgtaactaatgaattctacaataacttcattaacttaactggttctgggattacgatcggacttgttatctttacgttgtttgctgctaagtccgttcaatttaagacgattggtaaagttgaatttgtgccagcattattcaacattaacgaaccattcttgttcgggttaccgatcgtgatgaacccattcttggcaattccattcttcttgacaccggttatcgtggccttatccacttatctggtcatctacttcggcattgtgccaccattgaatggtttcgcggcaccgtggacgaccccagcaatcatttctggcttcctgattggtggctggaagatggctatctggcaaacaattacgttggtcatgtcaactgcaatttacttcccattcgctaagaagtacgatgctatcttaacgaaggaagaaggcgaaaaggccgctgcggaagctgctgctggtaacgctgaaattgaaaagatgtaattatagaaaggaattaaataattatggctgaaaaaattattatgttggcatgttctgcgggaatgtcaacctcactattagtgtctaagatggaagctgcggcaaagcaagatggtgttgattacaagatctttgccacctcagcggctgatattgaccatcaactgagtcaagatccgcatcccgatgtcttgttattaggaccacaagttcgctacatggcgaatgacgtgaagaagaagactgataaggctgggattccaatggatatcatcaatatgtccgactatggcatgatgaatggtgaaaatgtcttacaagcagctgaaaagttactcggcgacagataattaggatttaaccgggaaagtcaatgcaatcgtgaatcaccaacgtgtgcggtggttgctttaacatgattgggacttgtccgagtgataatcaaacactaaccaaatcctagattgttttggtggtgggcatctcaggatgttatatatgttacgattcctcactggctaattgctggtggggaatttttttggtggtggctgtggccgcgatacggtactgcgagggtgtgcaggcgagtaagcgagagaagcatgtagtgtggacgttactttggcagtgcttaattttaaaggacggctgctgattcaaaatggctattaatcaaacaaattaaataaaacccttgacctgaaacccgttcgagcagttaggataaaggtaatcaaagaacggtagctggccagcgccattatggaaatctattcatcaaattcgggagggttttatcatgggactattttcatttggtaaaaaagttaaattatatgcaccagtcgatggcacactgatagatttagccacagtcgctgcgggtcagacggggtttgcggtgacgccagaacgccaccatatcttcagtccagtaacgggaaccgtcagtgccctgattccagaacaaaatgcgatcgaactggcagctggaaagctgacggtacggttacgaatgggtgttaataccagcgcaactccggcaacttatgttcatgaaggcgaccaagtgacaccagaaacaccactcgcttttgtggatcaagagcaggccgctgaaaatggggaggatatgacggtgttggtggttgtggataaaggtgggcaacccgctgaaaaaatcagtttatccacaagtggacaagtgagccacgaccaagaagttgccacggttgttgctaagtaggacggatgatggggctaatcgtgtgtaattgtttgcgatgagctgagtcagaaggaatttcatcgcgtcaccacagttgattgatgcaaggtcaactagcaattgcaatgcagttgttaaatacgaaaacacacttcaaagctgctacttttgaagtgtgttttcgtgttcagttgatttttgattggcggttgcaagcaattcaatctgccgcagaatgagcctgtccttgtccacaagccatcagttcagcttggtaggcatcattgatgcgattgagtgcttggtgaaattccgtgataactttgttcatttggcgctgatacttttcatccaacgaataaccgttttgaacttgagttttaggccccgttgtttgattcaagtacgcctttaagtcatcgtctggctgtaacttttcgtataaatcgacattgtctagtaagcggacgatccggttgtatttacccgtaaaggtccgccgaataatctgtattcggtgacgaaagacatagcaaccggcctgaatgacggcttgaggttctgggtaggttgtcgtttgttggtagtgttggacgatttcaggaacaatctgccgaatcgcattattgatagtcggtgtaactaaggccgccgcgattttagttgggtcggatacgccctgttcagtctgtgaggccgaactgaacaagtcactagaaagaatgttcggattggtcgtagttaggtccacatattcccatagtaggacattgaattctgaatgattgagaccaccattttgaaagacagcggtgacatattcagtcaaactaccgtataaaaggtaattagtggatacgtcaaagtatgcagctactttagcgagtcggtccgcgttagctagcgtacgtcccttttcccagtcattaattgtgctttttccagccaagccaatcgcagatgcaagtttggccatacttaaaccagcggcaattcgaagttggtgaatacgattaccaacttgttgtttatcaatctgcaatttgatttcccccctgattggttcttagtatattctaacatagggagggaagcgctcgcattgttaacactgaatatattagcactttcgatgattggcgtggtaacgacagataagtagtatcaagtgcttagtgatacttatgaataattgtcataaaagcggtgctattatttaccggccagccgtctagttggatttcataaggttgttccgtaccaggataaatatgaccgggaatcgcaaccttttgccggtggtcgtgaatgatcaggaaaaacatcgcaggtcgacaaaggatggtcacgtgtgcggccaggcagtcgctaagcgtggctgctaaatgctggcgaatggtcgttagtcccgcagccccttcattaataacgattgaccaatcgaatgccaagtctgaataggcggctaatggtgttaattgttgcatgttgaatgcctcctccaaggtattaattagactaaatattactattagcatacatgcaaatagttgtgatgacgaccatctgcgcttgttatggtcaattaataagctggcttaacagagatcatgcgacaagtgtaaattgccagcgtatactagaagtattatgtgcaaaaggaagtgtcgagaaatgcaacaccggattgctgtgctggcagatattcatggaaacttgacggcgcttaatgctgtgttggcggatgcgcgtcagcaagccgcgacggattattggttcctcggtgatctattcttacccggcccgggtgccgaaaagctctaccagaccttagcggacactgcgccgtcagtatggttgcaaggtaattgggaacaggggattaatgcggtcatgactggaaacgggcgactggatgatccttcacagatttattttgcacgattgaccgcgtatctggtgacccatctgagcaaatcacattacgctgaattagtgcaacggcccattgcgacaacgatggtcgtgaacgggttaacttttcaactggcccataatcagccggaacgctcgactggtcacgacctgtatccggatgaacgccagtctaattttgatcacctagctggtgatgcggatgtggccgtttacggccatacccaccaacaaattatgcgggtgagtcagcggggccagctcattattaatcccggggcgacaggccaaccttatagtccatacgctaagttcatggctgatcagcgtgctcactatgcaatcttaacggtggatgacgcgggtcgaatcagtgtggattttcgaaaagttgattatgatattagccttgagttgaccgttgcgcgtgaacaacaattaccatatttagacttatatgaacatcttcgccggactggttttacgagtacccatgaccaagccttattgggcaaactgaacgctaagtttaattacgctaatgaggtacgacgattttttggcatgcaagcgtgatagttagtggtaagttagtgagttaactcttataatgattgaacaggatacgaggagggttttcatgaactttgcaccatcagaatggtttggctttaacaagcgagctagacatgatatgacgtttactaagactatcaatggcgagaccagtaccaagcaagtgtacgggcactttaacgtgtgggccctgttgttcacgtggttttatgcgctgttcagtgtgcggtgtcgaaccccgtttttcttactgaaaacggcggtgccattcttaggcatgctgtcgttaaatatggtgacgcagctgttttttagtgaccaagttgtcatgagtatcgggttactaggcgatatttggtatggttttatgtttgagacgtggtttagaaatcagctggttgcaaatggctatcaacaaacggcttagtgcgacaggaatagattagcttatcaggcttcccagcaagacgtggggagcttttttgattggggtcgttgacaagcttctggctagtaaagtatcgcaacataaataatatcgtttctttacaaacatctgactaaacactttacattccttaactattcttaaaagtgcagtttgttttacgataaaaaagatggagtgataattttataatgataaagccgcgtgttttaacgaccttattagtttgttcagcaatcttaacaacgacggtgaccccggccgtcgctgcagtaaccccaatggcgactccgagtgagcaagttgccgaaccagttgccagcccggccgttccaacagcaaccttgagtttggcaattcaaaatcaacaattggttgatttaattgggcagacgcagtggcaaacctatgggcagcctgccgtgacgaaggaccctgaatttaacgaccaagtgttgaacttggatggcaaatcagcgttttacacgaccttcacggatcagcagtttgcaaagttacagaatgggatggcgatcgaggcgtactttaaatatgatccagccgccgatgccaatggtgaacatgagatcttttctagccaacagggtggtggtttaggacttggggtgcaaaacaatcaagtcgttttcttcgcccatgatggttccggctataagactcctaaaggcaccttacataaggggcagtgggtgcatgcggttggtgtgatcgataagaataagacggctagcttgtatctggatggccagttagtccaacaagtggctatgcccggtgatttaaagctggcacaaggaaccaaagactttgtgctgggtggtgatgcggttcctggaagtcacgttcagtcaatgatgaccggtcaaattagacaggcccgcttgtatgatcagacattgacgtcgcaacaagtaagtcaattgaacgttgaagcacaggtcggcaagcagccggtcgcacccgtaccagtcgaccaaacgattgcgacgaagctcgttggcccgaagcgaattgcgagtgggcacacttatggtcttaatgtacacgcccggcaaatcaaagctaccggtgccgccctaatcaccatggatgtcgtgtatgatgcggctaagtttgactatgtcggtgcagaacgtctcttacaagggggaaagacgcagatccaactgattgcgcctggccgtattcgcctgactacgacggcgaacctttcaaaagctgaatttaaaatgtatgcgcaaacgcggttagcgcaccttaatttgaaagctaaggccgctggtgagacgcagatcaagtttgagcagctaactaaagatacaaccattgaactagggccagctcaaactgttgaaattcaaggtaagtacgcgctagattataacggtgacgggattattggtgttggtgacgtggccctggcaaacgcagccgataaagtggcagccgccaatgcagctgaaatcaagccttataaacacgtggtcgttttaacgactgatggtggtgggaacccctgggatccgaagggaatgtactatgcacaaggtgcggagcaaggaactaagactcccgtatggacaaccaacccagaaatcatgaagaaacgtcggaatacgtatacgatggacttattcaataagcagtttgcaatgagtacgtcagcgcgggccgtttcaccagcggtttcggcacaaaactacatttccatgttacatggtcggccatgggacacgctacctaaggaatatcaagggactaacgcgaccatgggacaagaatactttgcagactttaacaaaccacaagcaatgttcccatcagtatttaagatgttacaagccgataatccaactcggggcgctgcggctttctcagaatggggaccaatcgtcaatagcatcattgaaccagatgccgcggtgactactaaacagtcagcttcgctgaaatcctttgatgatgtggctaactatatcggcacgccagaatttcaaagtactgggttagtctacatgcaaagtgattatatggacggtcagggacacggtcacggctggtacaatgacaattactgggataagtacgcgcaatatgatgcgctgttcaagcgagtaatggataagcttgaagcaaccggtcacattcatgatacgttagtcattgccaacgctgatcatggcggttctggcaagaatcatggtggttgggatgaatataaccgcagtattttcatggcgctcggtggcgaaacggtcgataatggccgccgtttgcatggtggaagcaatgctgatatcagtgcgctcatcctgaatgctttgcaagtcccacagacaccacagatgtttgacagtcaggtctttgactcatcggcttttcttaagcagactgacctatcgaagaagaaacgttcagttgaaacgttaaagctcagtcgcaatgatcaggaagcaaaagttcaattgactcataaccaaaaccggcaactgacggcatttgatctgcaattggacttagcaggtcgggaagtcgctgacgttaaggttccaaccggcgtgcagattttacggcagacggtcgctaatggtcaattaagattaacagtcagtgccagccaacccgtgactgacctggtgacgattaaactcgtaccaagtaagacgcgtgcggctaagaccatcatgttaagtcaagcaatggctgccactgccgacggtacagaagtgcttgtggatttggataatgataatccactgacgagtacggctaaacccgacgaaaacggcagcacgacgactaaaccagatggcaatggtactgcggtcaagccggatgaaaatggcagcacgacaactaaaccagatggcaatggtactgccgttaaaccggatgaaaatggtagcacgacaactaaaccagatggcaatggtactgccgttaaaccggatgaaaatggtagcgcgacaactaaaccagatggcaatggtactgccgttaaaccggatgaaaatggcagcacgacaactaaaccagatggtaacggtactgccgttaaaccggatgaaaatggtagcaacacgactaaaccaggtggcaatggtactaccgttaagccggacaaaaatggtagtagcacaactaaaccgaatggcaacgggactgctgtcaaacccgacaagcatgaaactagcaccacggggagtgggacagttaatacatcaggtgcagacaaaacgagcaccaacgacaatggcacttcaatgacggccggtacagctagttcgcatgcaagtacagtcacggatcgggtgacgagtggcacggtattgcctgaaactagctcgagtgcaactactaatcatggcagtcattcgacaggtcatcatggtagcggctggttaccacagacaggtgaagcggtgcaacgctggctagcagtcgccggcggtgtgttcctcatgctgactggtgcaatcgcggtttggtggcggaagcgacgcgcctaggtaaatataacttggcacgataattttggaagtaagcacggatgaggcagtttctgggaacggtgtgtttctcgaaactgccttttgtgcacgctgatcaacggtggtgatgtcggttgaagtaccagagcgaaccaggttgtaatgtcactccttaataattaatttcaaattatttagcctaatagttagtttttgctgttatagtctaactaaagtgctatgataagattcaataaaaataaggtataagattttttccacagttgtttttttggtaaacttaatgactaatagtcacagttaaagcccttgatataaataaaggggagttggcacacgatattgacgtacagtaaggtagggtgagcgaggatgagctacttagaattaaaagatattcacaaggcctattatttaggcaaggaagctttcccagtcttgaatgggattaatctaacttttgaacgaggtgaattcgttgcgattttaggggaatctggcggtggtaagtcaacgttgatgaatatcattggtggcttggatcggcaatttcagggacaagtgttattgcaaggaaccgcgttagatcatcaccaagagaaacagatggatcagtatcggcgtgaaacagtcggttatatttatcaatcatataatttgatcaaccatctgtccgtgttagacaatgtcctgatctcgttagatatgaccaagttaaatcggtcagaacgtgagcaacgagctaagcaactgttaactcaggtggggttagcggatcaaattaaaaagtacccgaaccaattatctggtggccagaagcagcgagttgcgattgcccgggctttagcgagtgatccgcagattattatcgcggatgaaccgactggcgcattggattctgaaaataccacggaagttttgaaaattttggatcagattgcggcggaaggtcggcttgtaatttgtgtgacacattcgcaggatgttgcgaatgcgggtactcgaatcgtgcgcttagctgatggtaaaatcacggatgacgagcgggtgaaacccgcttatccggtcgatgaaaatcgccaacagattgcggcacgtaagttaccgtggtatgtgccactgaacacggcgtttaaacatctacgctatacttggacttggaacttgattattatcattgggacagcgattggtttattcgcagtgatgttgtttaacgggttaggtaatggcctcaaggggtatattaatcaggaaatcaatgatatggtcaatccccgtgtcgtgacagtgagtcggtatcaaaaatcgagtcaaagtcagcgaggcggcagccaagaaggtaaccagcaggcagctgccatgggggcgagtgtggcgacgaccaatcagccaacgttcagtacggcccaactgagtaaactgaaaaaagttgcgcatgttcagaccgttcagccaattttgagtgcaagcaacgcgacaattacagttggtaataaagactacaccgcttcatcgttaacaacgtggacggcttctaaccggaagtcgattattaaagctggtcacgtggctggtaagaatgaaatcgtcgtcgataagagtagtgtggcgaagaaatggtcatctaagaattggaagcaattggtcggtaagaaagtgactgtggcttttcagacaacgaataagagtggtaaaagtgtcacggttaaacggcaattaacggttgctgggatcacggacagcacgactggaagtggtgtgaacgccgtgacctacgccactatgaaagatatgcggtcagcaaagaatttaagtacgcagccaacttcagttgcggtgaaagttgattcgcgggagcataatgatgctgtaaccaagcagattaataagctaaagattgatggcaaacgggtttaccgtgccaccagtattgccagcatgcttgatacggtcaatacgtatgttaacttagcaaccacgattttggcggcaatcgctggaatttccctactagtctcagcgttaatgatcattgtgaccatgttcatgtcggtcagtgcccggaagaaagaaatcggaatcttacgtgcgctgggtgaaagtcgccgtgatattcggcgattgttcacgagtgaatcattgatcattggggtcatcagtgcactactagctactggaattgcttatggtattggagctgccttgaataaggtcctctaccaaatcgccagctacaatatgattgagattcaggtaagtaatattatctcgacctttatcattgccctggtgattgccttattagcagccatcttaccagcttggcgcgccgctcggttgaatccaatcgatgccctcgccgctgattaagtaattgtgagtcattaactaaaatagtctgttagtaaaacggtaatgaagcccagaacgggattcattaccgttttttgtgcgtggggcctttgatgctaatttgctttacatatgtcgaaattgacatataatgaagacaactaaatagaacacacattgcgcgagccaatttgtcatgaatcgtgattaaaatgtgcaaagtttttaagttcaaaagcagccagctatggaccgctggggaagttcgactcagcgtaaacttgtttagttaattcgtcctacaccgacctccaggcatttctgccaattgccggaacgtggtgggcacagatttgagccgaaaaaccacgtctcaaatactggcctttcactaaccaagcacaggacgcttgctaagtgaaatttcaccactgggcattgtcagaaacaccttccagtcgggatagcgttcgaatggctgatagggatgtactcaacttttgctgaatttgtcgttgtttttcaatctgacagttttctcaatcaactgtcagattgaaaaagtcttgtgataactcactatttctaaattaccgtagtaataattgaatatttcgaaaaagtggagaaggcactctgatatttaactgaaagggttcagtatcaaaatagccaacgacaaattgtaccgagttcagtggccgttcatcagccattcgagcggcttcccgactggaggggctggtgacaatgctcagtagccaaattattcttagctggaagtgggttgcttccggcttaggacgcgcaccggctgacgaacaacaatctaaacttggcacgttttaatcacagttgatgctaaatactagcacaacgcgtaaagaaaagtgggtgaaatgatgcattatggggttttagcgttaacgtttttgagtgtcaatttggattttttcttgatgttagtttttttattgaagaagtatcggttgtggcaggtcttgttgggctatttgttgggcaatcttattctactaacggcaagcttctttgtgggtaaagcactgaccttatttttgccagaatggttattaggattcttgggtgtgctgccgatttggcttgcgtttcacgacgatgatgatgataccgccgatcgggctggtgggtcgccggtgattaacgtactagttacttatttggccgtatgtgctggttgtaatttatcgatctttttacctgtgctcgttggggaaagcatggtacactttgtgatgactttaggatttattggtatattgacgatgcttgtcgtgcttatcattaaccaggtggcggaaatcaaggctgttcaaaagcaaatagcggctcatggtgaacggttgatgaaaatttgttacgtggtgattggcttatatgttttctgggatagtgggctaattagccatttaatcgcattcctatgattggtgagaacggaggaattggcatggaggtcagcgggccactattaactgaggcggctaaaatatacaaagtattgagtaatgttaatcggattaaaatcctaatttttttagaacaccatgaagcggacgtcacgcaaatcgttgaacatgttcatttggcgcagccattagtctcgcatcagttagcaattttgtttcagtatcagttggtatctaaaacgaagcgggggaagcatgtctactattgtctagacgatccccatattttggaaatggttgatgccatgattggacatgtggctcatgaaattaaacatgaaccgcatcatgattaatgacgggaggaagttgtgaaggttaagataacgaaacgacagcttatcagtggggcagtactgctagcattactattaattggactgttgatctatcgctatcatggtacttgggagatcattcagcatcgggtatttgatcaatcagcactggtggcccaagttcgacggcaccgcgcgattgatattttattagtagttcccttattgatttgcttttcaattattccaggtgcccccgtggcgacgatcagtgtcgttgctggcatctgtttcggcaaagggcttggggcagtgttaaatattattggcattacgctgggcaacttgattgcacaacgctttttcggacgggtaacggctcgacgtgatcaacagccgtcaaaactcgtgacggccattggtaagatgcggcaccccttattaggaatcgtgattgggtatacgataccgtttattccaacgtcattagttagtttagcggccattgaaacggcggtgacaccccggcagctaaccgcagcaacgctactgggcagcatgcccacggcgattatctatgcttggggtggcgatgaactgattaaagcgcacttcaagaatgcgttgatgttggttggactcttggtgctcttattgggattgttgtggttgatccaccatgatcgtcaacgagcagttgatttggatcattaataattgaaattataagcggcgggcccgccttcttaatcattgactaagagggtgtgcccgccgctttgcccgtagccgttatgatgcaactggctgggtatgcttgaattgattgatttgagttgtggtcagtgtaactgtcttatatggtaagaaatgttcagacagttctgagcctggatcggcctgaaagatctcgaccgtgtcgtcagctaagtctagctgatagacacgccgcgcatgcgggctgtcaacataaatagcggtagcggtgaagggccgccaggtaaaattagtcgccggtaataagtgccattgttctaatgcgtcgtaggtttcgtttggtgtcataatcgaatcccccttcagtgactattatagtatgtttaggttaatagtcaaataatgttttgttaacctaaaacccccgttttcacattgaaaacgggggttttgaggttattttaattgatttaacgaataactaaaactgaaatcggtgcgtattttgccatataagcagcttggctaccaaagtgtttggcaatcccctttttggctagggagccaataatgagtaagtccggttgaacgtgggggatgacttccttaacgatggtctcaccaggttcaccttccgcaatcattgcgtggactttggtgacgccagcagcttgggcttgcttttgatatttcaatatatgctgttcaagttcttggcgttccccatgaatgtagtctttactgagcgcttgatagacgttcatttcatcattttcaagaatcgagataatgaccagttcggcaccatcttgcttcgcttgatggattgcatagtcaaaagcaagtaaagcatcggcagaatcatcaacaccaacgagaatccggttaaatttagtcgccattatttgttggcctcctttgctgctgcagcaagttgctgttcaacgtaacgtttgttaccgcgttgtaggtcgaagacggtccagacaagtagggctaagatagcggcaatcaaaaagtaggctagaattttagaaaaagtctgttcgccagctgaaggattatcgccaaagaagcctaagattgaatctggtagaccgagtaagtttaagaaagtcaaaccgatgacggataaccaacctaaacctttgatccaaagtgagtttttgaatcgtttgcccatttctgccgcgctgtcagtcatcattaatagtggcaacatggagaatggaagagcgaaagccagaaagacttgtgagttattcatcagattattcaatgcagtatgctcgtcgattgcactcttaccactagttaatagcacgcaaatgaggacgggaataacggagatcaaccgggtcactaaccgccgtaaccagagtggcatccgcatgtggacgaacccttccatgatgacttgcccagttaacgtaccggtaattgtggagttttgcccagaagccagtaacgcgatggcgaagagggctgagagcgccccagatttagcaacactgattaaaataccattgcttaacattgatgtattggataatgcttcataaagaccgaagaatgaaggatctttaacagcgccactcttaaagacggcaacgcccataatcaataatagtgaattaaccacgaaagcgaatgaaagttggatattggaatcccaagcagcgaatttaacggtccgcgcgacatcttcctcatcgttgtggtcaatcttccgcgtttgtgagatggctgaatgtaagtacaaattgtgtggcatgacggtggcaccgataatccctaaagcaccagaaagtggcgtcataccgtttactgaacgacttgtcgagaaagtgtcagcggttgggactaggcccttgatcacaccgccccaatcagggttggacagtgcgacttgataaacgaatacgaataagataactaaaatcaaacaaaccacgatggcttcgattttccgaaaaccgattttggtcaataatagcaaaactaaaacgtcaagcacggtaataaacaccgcaatgactaacggaatgttgaacaataaatagagggcaatcgcagcaccgataacttcggcaatgtcggtcgccatgatggctaattcggttaaaatccacaagacgattccgagtgatttactcgtccgcgcccgaatcgcttgggccagatccatctgactcacgataccaagtttagccgccatgtattgtagtagcatcgcaatcaaacttgatatcaagatgacagacattagcatgtattggtagttttgaccaccggtgatggaagttgaccagttaccgggatccatgtaacctaccgcaactaaggcaccaggacctgaatacgcaaagagggttttccagaagttcagattcttgggaacctcgatggtaccgttaatttcctctagtgaggggccgttagcatattcaatcaatttatgcttccggtttggggtgttcgtcttttcgctcaattaaaagaccacctttctatatctctaaatctttgagccgttgtcattgtacaataaataaaagtaaatggaaatacttttttaggcatgcctacaaaataattaaaacagtttgatataaaacattctaattgataataatatttttaacttactaagcagtcaaccaagcagactaaaacgctatgacggaaatcattgtcgtagcgttttggttcgcgattctcaaaaaatacaacacgcgcaaatcgccggcttcatcgacttgcttagaaacttatcttgccgaacaatcacccgtcgcgtacgatgtgcttggaggtgtgaaaatgaatttttcagataatttaaaaattattcggcaacaaaagaagatgactcaaactgacatcgcgacgcaattgcacgtttcacgacagacgatttcaagctgggagaatggtcgaagctatccagatattggcatgttggtgcaaattagtacggcgtatgatttttcagtcgatcaactattgaagggagatttagggatgttaaaacactacgaggctcagtcggcaaataatcggcggcagcagcgcttggtggcaatcagttatgacttagtcgttggcctactatttttaagctatttgcactattttttgcattggaacgacggcatcgtgacgatggtcattaatggtggattgattgtgatgaccacgacgttgattatgaattataattattttgatgattgggcaaccactaaacgccaggcgtggcaattagtgggggttattacgatgttggcggttttaaatatcgcgttggtgtggccacaactagctagtcagatcccatcaacccagttcttaaatcaacatgctggtgcatatttagcggggaatgtgagcggaaaattagttggtgacttcttgcatctctttatttggacagcggcggccgtgatggcgattgaaattccgctcaatcgggcgagaaagacttcagattaggtgttcaggttgtggatggtgttattaagtgctgcgaccactatttagtagcgatcgagtcacgctcaacggtcattttggcacctatgataatgatgagttatcggctacggcaagccgtttttaattcatgattgtcgcagattttggttattcgttgatgtgcaacggccccatgatgatgccaactagctgcagaattagctgatgcggacagttaaagctggttggcgttttgtgtatgtgaattattggggtaaaactgaatagttgccatcgccaatagttaactgctgtgctaagattaagttgtgttatttttactcataaaaatgaagatacaacttaaacagaattctttcacaataatcatgtttaagtgaagaaagtcaggtgtagtaaccatgagtaagccagattcgattaaagttgatcaaaatgaggaaacggttactgaaattttagagccagcagcagaattagataaaaaaattatttcacccgttaaagaaacccgtaatcaggcgattcgctatatcttgtggggattgatcagtgttgcggtcaactttgcaactttctatacgatgtaccacctaatcggactcgaataccaggtcgctaatgttatttcctgggtcattgccgttcaagtcgcgttctgggtggaccgcttgaaagtgttcgaccatcattcacaccacgtttatcgtgaaatgggtaagttctatgcgacccggatcgtgacgtacgtcgttgaagcgattattttatggttgttgatgtcagtattggggagctcggcggtactagccaagattcttgggcaggccggcgccatcattgggaacttcttgttctcgaaactgtatgtttttcgaaataagtagccacatcaagacggaaatgaaaattcacgtctttttttgttcagtggggtgccgcggttgttagaatgacgagtaggtgtgtgaaagcggattaagattacaagtagattgcggtaatcctaaatattcttaatgattcactaagagctatgtttaagtggggtgtcatgtggtttaataaacttaaattattgcttgtcaccatgttaaaaaattaagaggagcgcacagcatgctaaaaaatctaatgcgcggaatcaaagcgctgtgtctaatcggcctcgtgttatttgggtggcgcaactatgatacgcttgccccgcgcgcggcagctttatatcagacgagtcgtcagaatctagcggctgccttgtcgggtgacttatctagtcatttgttgggtgctgatgatactagcagtgctaccgaagattcggcgactaactcaagtaagcaatcatcaggtcagcagacggataagactgcgagtgccagttcggtcactagctcgagttcgcaagcaactagttcaacaacgcaagcaacaccgattgaatcgatcgtgcagaacgccaccttaaagaagacgtattattattccttcgatcataatgttcccaaagcggcccggcaggtctttcttgaagctgtcgcgacttataaccagactgggttggtccatctggtagctggtcaagccagcgggtcacaaaattcagtgactttttcgatgtatcataaaaaaatgacgactggtgcgaccagtgttgaacttggtcatggtggccctgatattactaagcaaattagctggcgaggtatccaatattggaataacgcgacggctagtcttaacggctcatacgcctcagctttcagtaaatcggtcgcagttcatgagttaggtcatgcgttagggttggatcacagttcatcgactgaatccgtgatgtacccggtttcacaaggtaagagcacgttgtcaagtgctgatattgcggccctggaaacaatttatcaaaagaatgcgtaatttattttcgtaataccaaacaaaatttaaccacttttcaaattttgacctataatcaaggtgtatcaaaaattagaaaggaagttgttttagtatggctgcagcagttgaaatgaacagtatgttagacgaaaagatgacggacgtgtttgattggagcgactctaagttacccgtacgggatgcgatttggaatcactttatggacgctgatagtcatgatactgacaagacggctgacgaagtagcgccttatatgagtatggacgaagctaagctcaagagcgaagttgaaaaactcttaaaggcttaactagaataacgaccatgacggcctaatttttgaatgggaactgattgccagtttagtaatcagttctttttttatgcttttaatccggctgaataagctggttggtcaggggggcctctcaaccgaagctaatcaagaccaaaaataatttttttgaattactgtcgacactatgagcccgtagtggtttaccttttaattaatataaaaacaattaaaaactcacttgacttataattaaaagttaattaatctaagaaacatcaacattacaaaaacttttgaaagcgaggcgtgtcaattatgaaaattcaatctaacctaaccaacttgttgacaacccttgctgttcaaaatttagccttattattaacgaagaaggacccggtcacttgaccttgagtataactcaaaattcaagtgaactgagcccttctttcccattgtggtaatgaggctcagttccgggtaaaggcctcattcactacggtggatgaggcctttttgtgacttaaggaggatcggggtcaacaacgtagcaataaaaaaacgaaagtgggaataactaatgaaaaaatgggaaaaacaaacgatgaagattgcagcacttggtgcgatggcgttgacactggcagggtgtgccactgccaaatcaagttcaagtcaaggaaataatcctggcaagactattaaaattggggtcaatatggaattgtctggatctgcggccggttatggagaacagcaaaagcaaggcattcagttagccgtcaagaaaatcaataagagcggtggaatcaaggttggggggaccaagaagaaaattcagttggtgatccgggacaataagacatcgaacacgactgctgcttccgtggctgcccagctcgtgaataacgataaggtcgtggccgtagttggtcccgcgacaactagcgccgggactgcggcgatccctaatatgactaaggcggcagtaccatcagtcagtccatcagcgaccgatccggattatacgttgcaaaagagtggcaaagttcaaaagtacatattccgagcttgctatcagaataattttcaaggagccacggcagcaacctttgtgactaagaacttgaaggcgaaacgcgtcgccattttgactgataactccagtgattacggcacgggcctaacaaaggcgtttaagaagcagtatcggggcacggtcgttagcagccaaacgttccaagagggcgataaggactttaatgccatcctaactgcgttgaaacataaaaagatcgatgccatatatgcgcctggttactattcagaaatcggtctaatcgttaagcaagcgcggcaagcgggaatcaaggctccaatcgttggtagtgacgggatggcggatgctaaattagcccaaattgctggcaagtctaatgctaccaatgtttattacacgacgccattttctactaaggcttcggcaacgaacaaagttgcttcgaaatttatgagtgcttacaaggcaaagtatggtagtaccgcaccaactttttcagcactcgcttatgattcggtttatatgatcaaagcagccatcgaaaaggaaggctcggctaattctgttaaaatcgccgatggtttagccaaacttaagaacttcaagggtgtcactgggacgacgactatcgataagcaacataatcctgaaaagacgatttcaattgaacaattgacgaatggcgtggtcagcaaggtttataacgtcaaatagtcagactagtgaaagcgtgggggaacacatatgcagacatttggacaacaattgatcaacggactatcgctaggaagtatctacgcgttattggcgctaggctacacgatggtttatggcattatcaaattaattaattttgcacatggcgatatttatatgttgggggccttttggggctattacagtttgaagtcactacactttaactttgttgcggcgctcctgtccgcaatggtgatctgtgcagttagtggtgtgattattgaatatttcgcgtaccgcccattacgccattcaccgcgaattaccgcgctaatcacggcaatcggtgtttcattcttgcttgagaatggaatgtcatactttgttggtgcgagtgcccgttcatttccccaagcaatcaaagtggtgacttatcactggggcggattgcgggtatcgaatgtgcagctactgatcttaggaacggcgtgcctattaatgattctattggaattaattatcaaacgtaccaaaatgggtaaagcaatgcgggccgtttctgttgatcccgaagctgcacagttggtgggcatcaatcttaaccatacgatttcgttcacgttcgcattagggtctgcaatggccggcgctgccggagtcttgattggcctatactataattcgattgatccgttgatgggcatgacgcccggtatcaaggcctttgtcgcagccgtgattggtgggattggttctgtgcctggggcttcattggggggctttattatcggcatcctggagactggtgttcaggcgattggcctatccgcatacaaggacgcggtggtttactttgtcttaattgttattttgctcgtgttgccggctggaatattcggtaaacgaaccaaggaaaaagtctgagggaggcgccaaattaatgaaagcaaatttgaaaactaacatggcgtggctcggtgtgatggttatcggctttgttgtgattgacggtttagagctgatgggcgtcattaactcgtttattgaaaatatgctggtgacgattggtatcaacgttatattggcggcgggactcaatctgattattgggtttgcaggccagttctcgcttggtcacgccggctttatggcaattggcgcctacgcgactggtattatgacccaaacaatggcgacgcccgcgggattttatctgtcgatgatcgtcggcatggtgattgccatggtagcggcggtcattgttggcatcccaacattacgattgcgcggtgattacttagccattgcgacgatgggggcggccgaaatcattcggattctaatcaataatctgaaaattacgaacggtgcagcggggttattcaatatcccggcacttgcttcgtgggcaacggtgtatgtcttaatgtgtctgacaacgattatcacggtcaactttattcacagtcgcggtggtcgggccgtgatggctgtgcgggatgatgaactggcggctggtgccatgggaatcaatacgacgcgctggaagttggccgctttcgtctttggcgcggcgactgcggcgattggtgggtcgttgcacgcggcctacattcagacgattgcgccgggtgattttaatatcatggcttccattgcgattctgattattgtcgtactcggtggggtcggcagtattaccgggactttcgtagccgcaatcgtattaggagcgctcgacacgatcttacaaaacttcggtacgatccgaatgattatttattcattggcactgattttgattatgatttttaagccagccggactgttaggaacgtgggagttctcattcacgcgtctattcagacggcgatcaactaaggaggcggttaaccatgagtagccggttattagacgcacaagggttggtcaaaaactttggcggcctgaccgccgttgctgacgtttcactccattttgatcaagacgagctgattggtttgattggcccgaatggtgctggtaaaaccacgttattcaacttgttgactggtgaaacgccggttagttcgggtagcattagtttctacacagatcagggcgtggtgtcgttaaatggcaagcagcccgctacgattgctcgggttggtatttcacggacatttcagaatatccggttgttcaaggagatgagtgtacttgataacgtgcgcattgcaatgaccaatcattatcatgaacggtttttgactagcatcctgcgcttacctaagtattaccagactgagcgggcaatgacccaggcggcgcaagccttattagcgatgtttgatttgaccgccgtcgctgatcagcccgcaaagagtttaccatatggtattcagcggcgattagagattgtgcgggccctggcgacgaagcccaagttactcttccttgatgaacccgcagcgggtatgaatcccgaagaaacggcggatttgacgcgcttgattcgccgaattcaacaagaatttcatattaccgttgtgctaattgaacacgacatgtcactagttatgaacgtagtcgagcggctctacgtgttggagcacggggcgttactggcaactgggacgccaaaagccattcaacatgatccggccgttatcaaggcctatctaggaggggtgtaaatgcttaaagtacgtgatttagtcgttaattacggcgcgattcaggcagtcaaaggtgttagttttgacgtgcaacagggtgaaatcgttacgttgattggtgctaacggcgccgggaaatctacgttgttgcacacgatatctggcttgatgcgtccggtcagtggttctattcactatttggatcaacccatccaaaagacggccgctcctaaaattgtgcgggcgggtatctcgcaagttcctgaaggacgccatatttttcccggcctgtctgttcaagaaaatctacaaatgggtgcttttttacggcaggatcggggtcaattggctcagacttatcagcaagtttacgactactttccaattttgaagaaacgtcggcatcaagatgccgcgacgctctcaggtggtgaacaacaaatgttggcgatgggccgcgcactgatggcgcagcccaagctgatgttgcttgacgaaccttcaatgggattagcgcccatctttattaatgagatctttgagatcatcaaggcaatcaatcaggctggaacgacggttttactaattgaacaaaatgccaatcaagccctgaaaatcgctgaccgcggctatgtcttagctagtggacaagtcaagcttagtggtcggggttccgaattattagctaattcagaagttcagaaagcttatctagggggttaagtatgagtgttgcagattatatgacaccacgcctggtcgttgttagtcctaaaacgacgatcagtgtggcggtcgaattaatgaagaaaaatgcgattcatcggttacccgtcatggcaggtaatcgaatggtcggcttgatcacgcatggtatcattcagcgtgcgatgccatcacaggccacgagtttgtcggtgtatgaattaaattacttacttactaagacgacggtggatcaaatcatggaaacggcggttcaaactgtcgcagcaaccgctcagttagaaacagcgattgcaacgatgcggaaaaataagatcggcgtactaccagtcatgacgggcgaccaagttgtgggcatcattactaataatgatatcttggatgcgttcttaaatattgctggttacggccagccgggaatcgtaactcgggtggtggtccatcatgaccatgtcggcgtaatttttgccatcggaaaggtcttaacagaacacgatttaagtattcagacgttaatggtcgtaaatcaccaggctgaaaaagtgattgagctccacgtgaatagtgaacaggccgccgatgttaaccaagtcttgacagcagcaggttttgaagtacaaccggtcagtgattagctctggcggctattgtctattattggagattaggtggctaaagacatcgcgttgtacaaagttatagggcgtggtgaaagtgtgtggtcacaaaaaagattcaggatgattcaatcctgagtcttttttttcgacgtattgttacttaaggctgcggtcgactgaatgttttatagacaggacattcgctagctaatgggaaattacggcaactaactagtacttgtgaggagtagcgataactgattggattcgttattaccatgcggttttgagcggtacacacaaatttaagaccggataataaaattgatagcaaaccgagactgatcaagaagaacgagactgacctgaacgtcacaataaaaaaaattattattaattggattaaatccctatctgttgttttattaatgttgtacaagtattagaaaaacagcggatagaacgttttttaatgtaaaaatgatgaaacaaaaaattaatactgcatacaaaatacggccggaacagttgacctggttgattttcacgggttaacaaagaagcaactcaaagattaaggggttgtaattgttgggaagtgtggtaaattattagtgcagttaatgaattaggcaaactaaagggatgcacgatatgaaaaaagtagtaggcagtttactcatgaccagtaccattttattgggggccttaacgccaatcgttggtcacgcggccgatggtgaaaatcggagtgggacgacgaatgcaacggcaacgtttacggcaaataccactaatccagttgatccggtcgatccgactgacccaacgaaaccacttgaccctaagcctggtgatggcgataacggtgccaattccggtgctggtttgtcactgatctatgcgcccggtaaacttgatttcggttcgcatgaaattgacgtgatcaataaccaaagctataaagcattgactggtagcgatggtagcacggtcaccatggggtcaacgggtaaagttggtttacaagtctctgatcaacgcgggacgaatgcgggttggacattgagtgttgccgctgcggatggcacggatggtaacttaagtacgcttaagggggccacggtctccttacctgcagggacggtcatttcttccggatcggaagctagcaacggcagtaccggtggtaatggtgcggtcggacaagctgttgaacttgacttaggtagtcaagcttcaactagtgccggggcgtcctttacggggacaacttctgggaatgtcatgacagcagcggataagagtggggcggggattacgtctgacttgcttgatccggctgcagtcaagttgaacgtcgtggctaacacggcggccgctacgacttacaagggcgtcctaaattggacattaacatcatcagcagataattaaattaatgaacttggagatgaccacgtaatagtgggcgtctcttttacataataatcgacggggggacgcaataatgaagaaaatgatgcggtggttaggggccatcttagtgatgatcagcggcttgtccgcggtggttccagcacaggcagccaatacggacaccagtaataatattggttttagtgtcgcggcccaaacgccgaaaaaccaaattgataaacaggcaacgttttttgacctcaaaatgacggcagggcagacccaaacgttgcagacgcgaatctataatacgactaaccgggatatccgcgttgcaatggggattcatacggcatataccaacagtggcggcgcaattgaatacgtgaccccggcgaaaaagtatgatgcctcactgcagtatcgggtcgaccaattgactaaaatcaaggggccaacgacggtgacagttccagccaacggttctaagctggtcagtgcccaaacgaccatgccgactaaggattttaacggtgccctgttaggtggttggtattttaaacgcgtcgatcaaaaggtcactggtgaagtgaagggtgctacgaatattagcagtgaatattcttatgtggtgggcatcaagtacagcttagggactgcgcccacgcccgtcttgaaactaagcgatgtcgctgctggaatggttaattatcaccggagtatcgtggtgacgttacgcaatactgcagcagtgatgataccacgggttaccatgaagacgacggtcacagccaaagatagtggcaaaaccgtcgtaaaggcgaccaaacaaggcgtgatgttggcgcctaatacgacgtttaattacccattgttactcaacaaacagaagcttcaagcggggacgtatcatttacacttggttgcgcacaacagcgctcataagtggacttttgaccgcgacttcaagattagtgccgccacggctaagacgtataaccaggatacggttgatgataacggcatcagtatctggtggttgattggtctgggcgcactgggcatgttgattgtagtcttactgattttgtggttagtgcttttcttgaagaagcggcggcaatcccaagattaacagcaatcggctcggtgtttagtttgggactgctaagcgtcatgaacaattagtagctgggtaaaaaagggggactgacaaatgatacgatggctgttgatacggggcttactgggcttattaatcggcctaggaccatccatcgggggagctgctcagacggtgggcacttcgtcgacacaaatacagttctatacgtcacgttcagcggacaaacaaacgcctacgacggtgcaacaaattccgcagggcgacgttgtgtacgcaacgaaggctgtcaaagccacgcccaatcgctttgtcggtcagtggcaacaggtactagcaacgggccgtttgccccaaaccggggtccaagcgaatcactattatcagtggctcgggttcctgaccttaatggcactcttattagggtggcaggtgcttaagttaatgcgtgaaaggggggcgaacacgtgaaacgactgcggcatattaagctaggcatgctgttactgagctgcttagcgtttatcagcatgctagcgattacgagtcaggcagcggcgcccgtgacgtctgcgacaacgacaatcgctaattcgagtaataagtactacacttactttaatagcggtgatgtcgttgggttcaatatctcgggtggaattgggatatatccaagcttaaccaaagtgacggccaactatgcggatcagggacgtatatcgactaagactaccacaataacgttgacctttagtggttcgttgtttgcgaatagttcggagattaaaacgctatattacgatgtcttttataagcaagcaaccgaagaatttggaacttcactagtgaccaagactccgacaaatatggcgactggttctagtacggtatcgatgaatactagcaagactttgacagtcgatatgagtaagttaaaggataatttgccagtatatattgggtttcgattaactacagtaaagggtgagacatccacgtaccgcttggcagtgtttaatcggattagccttaatacgacgctgaatacgccaacaacgacggataccactctgacaggaactgggattgccggtaataccgtcagcacgacaattaatggtaagtcgtacacggcgacaatcggtagtgatggcaaatatgaaattaagttaaatgatggcctcagtggggtcacttcagtcacagtaacgcagacgggagaagccgattatggcgaatccgaatcggtgactaaggacgtgacgataccaccgctgacaatcaaaagtagcagtacagcggtgaatttgtccgtgagtgatctagcggcgttgacgtctgatagcgatgctgttaattggttagttaagcaggctggcgtggttgcgacgaatcctagtaacgctaatgacacgatgacttatcatgcaagtgagagcggtctggtcgcgttattcaaggggctcgctgataatcagagtaccacggtccacatctatgcgacgagcgccagcgacttaacatctgataaaattgcgctacaagtaactaagttagcagggacgctgtcgtttggtcaattaacgaccaatatgagcttcggcgatttaaaggtgccgttgacaccacaagtctatcaaccgactaatccactagccatcagtgtgactgatacccgggcgaccggggctaagtggtatttgtacgttagtgccacgccgctgacatcgacaacggtcagtggacggacgttgaagggcgatttggtttaccgtgatggtagtgcacagaccgtcttaacgaatcaagcgacgttggtccaacagggacaaaaagtcgcggggacgaccgatacggtagtcactgacgattggtcgacaacgaagggaatcggattatcagcgcaaccaggtatttacgctgatacttatcaaggtaccttgagttggactttgagtgatacgccagataaataagttagcgtgtatcagttgggtgacggggactttgaccaattgcacttaaattttttactggttcgcagttgacaagttaggtgtcgtcatggtttactattagctataaattgaaacggaggatgactaatatgtcattagcaactaaccttcaattaaataatcaatttgcctttagctttttctttagatagcgtttgtattcgtttgatggatacaagcgcacgcaacgcgtttgtatctatcgagagctaaagttattcaacatgacttaaacgccaggtagatgcagggacaatctatctggaaaaatatcgggcccgataaaacaccagttagattcttcccagaatctaactggtgttttttgttttcagtccggttcatcaagacgttgatgaacgttgggcgaaccagacaatttttaaggagcgtttcaagatgaaaaaaacaactttaggggtattaattttaggtgctgggttactattagctggttgtggcaaacaagcaacgagtggtcagcaaagcgtgtcggtgggcatcttacaggtggttcaacatggttcactagaccaagcgcgcaagggcttcaaagccggattacaaaaagaattaaaagcgcataacagtaaaataacggtcaagtatcactatctaaatgcacagggtgatcagagtaatttgaatacaatgagccaacaactcgtccaacagaaaaatgatttgttagttggcatcgcaacgccagctgctcaggcattagccaagaaaacgacgacggtgccgaccttggttacggccgtaaccgatttgaaagcggcggggttggtgaaaagtgatacgaagccccaaactaatgtgagcggcacgagcgatttaatgcccgtcggcaaacaattacagttattgaagaatatgagtacaggttataaaccgttggggattatgtataactcgtcagaagaaaattcagtgctacaagtcaagttggcgaaggcttacgcgaaaaagcacggtatcaacttaaaggtcgttagcgcaacgagtactaatgacgttgccagtgttttggccggtttgacgggtaaaatatctggcctttacttaccaaccgataatttgatggcgagtgcgatgaagacgattggtcagaagaccaaggctgcaaagctaccagtggtaacgggttcgattgaaatggctgaagatggcgggactgcgacgtatggtcttaactattacgaattaggtgaacagactggaaaaatggcttaccaagtcttaatcaagaagcaaaagccgcaaacaatggcggttcaaacagctgacaagttacacctctacgtcaataaagcgaatgctaaggcaatcggcttacaaccaagtacaatcaagcaaccataagaggggagcgaggtaatatgttaatcacgagtattggacaaggtttattatgggcgccactggttatcggggtgttcctcactttcagaattttaaacatccctgatttgaccaccgagggtagttttccattaggggctgccgtgacgattagtagcatgttggccggacagtcagctatcgtggcgagtttattaggatttgtcgccggatgtttggccggttgggtcacgggggtattagatactaagcttaaaatgccgtcattattggccggaattctgacgatgacgggactatattccatcaacatgcacattatgggcaaagcgaatattcccttgcttgaccagaaaacgttgatgggatggttaccagcgagctggtctttgaatttacaaaccatcgtgattgggtctgtggttacgctggtcgtcctggccgggttgatttggttattccagacgcgtttgggactatctttgatggcaacgggtaataatcctgcgatgagtgctgcgaatggaatctataccgatcggatggtcattattggctatatgttatctaacggtttgattgctttatcgggtggtctgattgcacagagtaacggttacgcggatattgggatgggaattgggacgattgtcatcgggctggcttcagtcctggttggtgaaatcttcttacatggtcgtcaaatctgggtccgtttgactggaatggtcgtgggcgccattatctatcgttatttgttgactttggcaatgggcttaggtttccccgtcaatgacttaaagattttatcagcggcgattcttgtcatcgtcatctgcttgccactattacaaaataaataccggacaaaacggcagttacgccggtaccttaaagagattggagtcgatcaacatgccacacccaactattctgaacgtccaacacttgcaaaaagtcttctttcccggaaccagaaacgagcggcacgtcttaaaggacgtgaatctaacgattgaacctggcgaatttgtggcggttattgggaacaacggcgccggcaagtcgaccttgctcaatacgattgcaggaacgttaaatacggatgctggagagattacactagccaatcatcgtgtgaccaatcgtcccgttgcgtatcggtcacggtgggtggcccgggtgttccaagatcctaagttgggtaccgctggcgaactaagtgtggcccagaatctcacgttagcccaacgtcatacggggagcttgagtctgcgccgttatcgccaacgtggacaggaagaacgatacttaaggttgctggctagtcttaatatggggttagaagcgcgactgaatacgcaagtgaagtatttatccggggggcaacggcaagccttatccttactgatggccaccttgagccaaccagagctgttgttgctggatgagcatacggcggcgcttgacccgaagacgagtgcggaagtgatggcgctgacccaacaaatcgtgacggccaatcatctgacaacgatgatgattacgcacaaaatgagcgatgcgttgacatacggcgaccggctagtgatggtacaggatggtcagatcaagttggacgtgcgtggtgccgaaaagcaagcattgcggacggatgacttggtgacgatgttcgcagctgaggtgtgaggctgtcgttgcaaaaaacgacttgcaacggccgatgatcagttagcaggtcattatcttacttaacgaatttcgcaatcaaataaatgatcagtcctaaactgatgagaccaccgatgatagatataatgaaaattaaatcgccaaaatacattggttttcctttctagcttagcgcatgctgagcaataccaaaatataattattgtaggttcggttagtcaccgcttcgtgcaaatcatgattaaggcgtgctgttagtttagattgcagttcatcaacacgtgttcgtccgacttccgaggctaggtgacaatcgttttagcataccatattagtttcgtggcgataatattcatatgacgtataattctggaaaaataagttaattgaataatccataattgccggtaaacgttgctaaatggcgaatgagttacgttaagggaaatttaaagaattgtccggcgactagattatcgaaaatagccctctgcgtatcaaatacgtagggggctattcatataattggcgcatgtaacaagttatttcgtcgtgaccaacataatctcatcactgactttgacttggttggtcaacatcttgaatttcatcaaattgacagcatccatgttagtgatgataaccatcatggttgtggccttaccagcagccttaatcgctgccaggtcagctttggcaactacttcgccatggtgaacgggttgaccggtttggactagtacttcaaagggagcaccgttcaactcaacggtatcaatacccatatgcagcagaatttctaaccctgaatcggttttaaaaccgattgcatgcttggtaggaaagacggtgctgaccgtcccgtcgaccggcgtcgtaatcgtcccgtctgcgggatcaattgcgaagccatcgcccaacatcttcttagcaaatgtgttgtcggcgacgttttcaatatctacgtactgaccgttagcgacgctgtaaaagtcggtggtcacaccactagtgatattagtcgcagttggtgctgtcgcaacagcttcatcgctagtcgtggtcttagtaatgggtgcgttcgtgagctttaagtggctcaacacgtcggcgacgaattggacttcggtcccaataatgatttgtagattatggtcgtctaatttgttaataccagcagcaccactgtgtttgatagcggcttcattaatggttgacgtatcggctaattgcaatcggagacgggtcgtgcagttatcgacaaccgttaaattatcggcaccaccgagcgcagcgtaaatttgcttggcttgacgtgtgtatttgtcatcatccgcatcagtggcgatggctaaatcatcggcatcatcggctgtcactggttcgcggcccggtgtcatcaaatggaacttcttgattgcgaagtcaaagccaaagtagtaaatgacggctagaaccaatccttgtaagattaacattaaaggttgattagcaatcgggtttttaaggcttaaaatgtagtcaactaacccggcggagaaggcaaaaccggctgtccagtgcatgaaggcagcaaaggctagcgataaaccagtgaagattgcgtgtaaaacatagagtggccaagctacgaacataaatgagaactctaatggttcggtcacaccggtaaagaaggacgcaaacgcaccggccatcatcagggatgctgtttcaactttacgttctggtaacgcattgcggtaaatcgcgtaggccccagctggtaaaccaaacatcatgactgggaagaaaccagcttggtacatcccagtcacacccttgatccccttgtgtgctaagaatttaccaatatcattgatgccagcaacgtcaaaccagaaaacggagttgagtgcttggtgcaacccagttggaatcaataggcggttgaagaagccatagagaccggccccaacggcaccgagacccacgatgaatttgccaaaggtaactaatgcatcatagacgggcggccaaacaatgagaagcgcaacgctgactaataacatggtcagcgcggctaagattgggactagacgtttaccactgaaaaatgaaagagccatcggtagtttggtctcgtggaagcgattgtaaagagctgcggcaatcagaccagagatgatcccaatgaagacgttgccaatttgaccaaacgctggattaacagtggctaccttgatattcaagagtgtggcgaccgattctggttttaaaacgttagttggtaattcaaaggcaactaaaccagcaagagcggctgcgccatctttatcttttgacataccgagtgccaaaccaactgcaaatagtagtggtaattggctcagaacagcgttaccaccggcttgtaagaagtgtgcgacgatgtcgttactagcagatgcccaccagttaccaattcccacaagtaaagctgctgcgggtagaacggcaacgggtaattgcagtgaacggcccatacgttgcaaataattcttcatgtacaaaatccccctaaaaagatagttttgaataagtgcaaccattgttgtacggtggtgaaagcgctattacaaccgctttttattggtatagtccattggtttaataagattaacagtacaattgggagtggtctaatataaatacaaatacggaactacaagtccgacaagcataagtaatactggtataaacgatgaccccaggtaatgagcataaaaaataaatattggtcggaataataggtgctaatgatagcgatttcaaaataattgtgaaaacaaatacaaaatcagttataataagattgattaatgaatttgttacttttaaaaaaggagttgtttaggatgccaacaaccatgacgactaatattaaaaataatgattttaaagacgtggtgtttaaccgccaatcagtacggcagtttgatccgactgtcaaaattgaccgtgaagaattgcaaacgattattgatgagacaatcagtgcaccatcagcatgcaacttgcaaccctggcactttgtggttgccgatagtgcggacggtaaggcgaaagcaaagtcggttttaatgccgtttaattatccacaaattgattcttgctcagccatgatttttgtcctaggcgatacgcaatcgcatttggtctatcgggacgtgtggaataaagcttgtgaagaaggacgcattaccccggaaaagcgggatcaaatcttcaagacgttcttaccaatgtatgaaaatgcgagtccagaatttctacaagccgatgcgatgattgatagtagtatggccgcaatgcaattactattgattgcccgcgcacatggctatgatgctaatccaattgcgggttatgcggcagataaagtcgcgacgacctttggcttggatgccaagcgctatgtaccagtgatggctatagcacttggcaaggcggctagcgaaccgatcacgacaacgcgttacgctggtacgcaggttaccgaattcatttaattgagctaacctttttaactcgcgaaaatatcgcgagtttttttgtcatcgggcttgttctcgaacgcgtttgagcaggtatactaagggtaagattaataaaataattgacgggagtacattggcatgattaattatttgttttcagatttagatgggacgctattgaattctcaaggaattgtgagtccacaaactgttcaagcagtgcgagaaagtggcttaccaatgacgcttgtatcagctcgcgcacctattgaaatgcgtgatacaattcaggcactagggttaacaggtccccagattggctttaatggtggtttgatttttgaatattgtcagaatcaagttaaggcgttacaagcagccccgttagatcagaaattagcattacaagtgctcgagtttgttaagacggagtcgccgacagttagcctgagctgttacacgcaaacggattgggtgacggaaaaagttgatgctgggactcgtacagaacagcagctgacgggacaaatagtaacaccgattacgagttatacagatcactttcggcaatatcctgcagctatttttaaaattatgattatgaccttagacaaacatgttatggcaacactcgcaatggcccttaaacaattggtcggtagttacgctagtgttaaattatctggacagacgtatttagaagtaactagtgctcaggcacaaaagtctcgtggaattgcatttattaaagaacgatatcatttaacaactaatgagatagctgcctttggtgatggtgaaaacgatttgccaatgctgagggcggttggtttaccaattgtaatgggcaatgctgattcaactattcagcaatatgggcatcgtgtgaccaaacgtaatgatgaagatggcgtggcttacgccttgtcacatttaatcgggaggtaatattgatgacgaacattcatgatattgcccgtttgtctggttattcagtttccaccgtttcgcgcgtactgaatcatcaaaattatgtttctgccaaaactcgtggagatattgaagcggtaatcaacaaattagattatgttccaaacgccgtagctcgtaacctgagtcggggggcaacgttaactattggagttgtgctgccgcatgttgatcatccatactttactcaactgttacatggaattatgcgagctgcttttgctgcgaattatcacattgtattactaccatccaaatgggactcgcaattagagttgaaatacttggaggcactccgtcagcatgcttatgatgcactgatttttacatcccacgggttgccattaaaaaaacttgcagtttatcagcgttacggacgaatcgtattgtgtgaaaatccccatgactattctttaccagctgcctatgcccagcgtacagcgacgtatgttgaggcgtttacgtatttaaaacagcgacatcatcagcgaatcgcgatattaacaagtcgaccgctggaggttagtgccacgacacaggcgatggttggggcctatgaacaagtttatcagcggacattgtcaccgaagttattgtataccggaatcattacggcggaagatggcgagcatgctggaacctattttgcccaacttactgaaccagtgaccgcggtactgactaatggtgatgacattgcagtggggatgcgtcgagcttatttggctgcgcaacggcctgttccacttttgattgggcaggagcatcagttgtctggtgaagtgttgggcattccaaccattgatcatcattttgaagtcgtgggagctcgggcattagaattagcaatcagtgaacatccgcaaagtattgctttgccggccgaactcatcattaataattaattacactaaattgaatagtaataagtccgctctttctgagaactgctggtcagaaagagcggacttttaagttatcgtgcaaatcgtagtcttgataattgaggtaaaagcaatatcgttaatgatagttgcggtgaagtcgcaattggacaggtaaaaaaatgtttatataattagttagcttttgttgcatttatctaactatcgtgctaacataagcatcattcaaatcaaggaggacaaaaattcatgacagttaataatcgtgatttatttagtagttttgggaagttatttcaaaatcgggccttcgtcatggcggttgcccaacaatttcattttggagaccatggttctgagcgtggtcaaatgggaattttacgggtattggcggatgcacccgctggtttaaccaatgctgagattgctgagatcttggatattcgaccaagttcagttagtgccacgttgaatcggttagaagacgggggcttgattgaacgcgaaccaagtgcgcatgacaaacgggtggtgatcgtccggttaagtgaccgtggtcgtgagatggcggaccatcgcgcgcaaggaacgagtgatttagcggatcagttatttggtaatctgacggatgatgagcgcgatcagttacaacatttattagataagttgcgggccaatgcggatgacatcgatattcaagatttaatgcaatttggtcaacaacacggttttggcccacgtcccggttggggtcatgggcatcattggtttaattaaattttagaaacacgaggcataagagcagatggaacgaccacaagcagcatactcgcgtccggcgggtgataaatttgatttaaaacaattcttacagttgattcggcacgctagccctcgttattggcaactctggttgggcttggcattaggcttattggcgactggtgcgcagttgatggtgcccaagtttgcccaaacgttgattaatgggtttagtcacggcgttaatcagaccttactaattggtgtgattggcttattcttgatcagtgcagtcattagcgcgttatcaggttccttattggggatttttggtgaaaatgttgtcgctaatttacgggggactttatggcataaattagtccggctcccggttcgctactttgacaacgttaagacgggtgaaatgacgtcgcggttggtgaatgattcgacgcagatcaaagacttgctcgctaacgcatttccgcaagttgtgacgtcgctgatgcaactagttggggccatcgcaatcatggtcttgatggactggcgaatgaccttgattatggtcttggcgattccagccgttttattagtcatgtttccaatcatgcggcagacgggcaagattggtcatgaacgccaagatgctttagctaattttagcgggacggcagaagaaacgctgagtgagattcgcttagtgaaatcgtccaatgctgaaccagtggaaacaacgactggtgcacatcagattaagacgttgtatcgaattggactacgcgaagccatttatgattccatctcaagtccagtgatgacggcaacgatgatggcgttattcgttggggtactattgtatgcgtctgcgcgggttgccagtggaacgatgacgatggggactttggtctcatttttaatgtatctgttccaaatcattggcccagctgggatgcttggtcagttcttcaccacgttagcaaaggccagtggctcgacggcccggattcgggagttgttgaatgaaccagaagaacaattgacggttggtgttgaacacgcagtcgccaatgagactttggcgatgcaccatgttgactttgcctatgatgatgatcaacaaattttacacgatgtcagttttgaagctaaaccaaatacggtggtggcgtttgcgggaccgtctggtggtggtaagtcgactatctttggccttctggaacgttattatcaaccaaccgctggtgaaattagtattggcgagcaagatgttaatgaactaagtctcaatagttggcggtcacaaatcgggtatgtcagtcaagactcggcaatcatggctggcacgattcgtcaaaacttaacgtacggtgctgatcggttatactccgacaatgagttgtggcacgtcttagaattagcttccgcggctgactttgtacgcgccatggcagatggccttgagacgcaagttggcgaacgtggggttaaagtcagtggtggtcaacggcaacggttagccattgcacgggcttttctacgagaccccaagattctaatgctcgatgaagccactgctagtctggattccgaatcggaggcgatggtacaacaagccctcggcgaattaatgaagggccggacgaccctagtgatcgcccatcggctgagcacaatcgtggatgcggatcagatttacttcattgaagatgggcatgtgagtggttcaggtacgcatcaagagctgatggcgaacgtcccactctatcgggattacgttaaaattcaatttaaagattaactaaaaatagttggttaccgagatattgatgtatagtatccaactgacttgttgatttaatagatatcagatattttgggagatagattagcttaaatgagtgattgagccagttatttcgcgatggctggtatttgaatgaagacgctgaatttggaagcatggaaattatcaaagctcaatctttccaaatgtaggtgttataactaagatagttgctgagttcggattgctgatttgaaaatcatatgcaacaactgaatcatgcaaacacagtttgccaatcaaaagcgcacattaaaaggccaccatttctggtgaccttttaattgtgattcagaaagctagcttttagatatgtaaggcgaaaggtgccatcactggcgacccttcaatttattattatagccaagtcaattttctgtcgttagactgaatagagcatattgatttctagtgaagattataatagtgttgcgcagcaactattatcggttatggccgaaacaaaccatgtatgtcattaatgaaatgctaataatcatgccatccactaaaatagttttaagaagaatctgtttaagccagaaaacgttagctgatgatagtcgaaactctgaatacccacttttattttgctcccaataattcctcgtaagttttgaagtacgactgaaccaccaagtgaatccataagcggcgcaattaattattgtggcctccactggatatccatttgccattatgaaaatttgtcctccagtactgagagccgctatgaagctactaataaaatagccgattaggtacttctttgctgttggattattttttagtggctctaataaatatttttttctggcgttgatacgtgctcggaggttgaagaaactggctcgcatcttaatgcttggcaaacaaagaataactagccctattataaagagatttattaacgctatgaaaatcacagtactaagagtgtttgcaaccgagttagattgcatttgcatcccccttacatggtcttaattataatttttggtactcaaaaccgttattatcaagcaacagccgctaacaaagtgataatgaacatcatcataactgctaaggacgattctgttgaagctggcgtgggtgtgaattgtaaatctggatgcaagttattaatatagtctagagcatttgcgggaatactcaaaatagtctttagattattattataatcagttgcctgagtttgagtaacattaactggtaggggcgctatgaattcatggaagtgaatgtcaagtgtaatttcatattcaatagaatatgttttcccattgctggcagtgtgctcaaacgttgatttaattttcagggtaatcgtcatgagagaagttttaatagatgtattacttgaaatatcaccattttttatgacacccgcaatttcgttcatagcatttgtcatatcagatgaacctaatgcagtttcattctgtgtaagtaactcttggactgcatcactaacagaaaaactggtactaccatcatttaccttatatgtcgctgacacggtaccatcgtcgtcactaatgcttccttctaaatcaacttttaaagaaaaatcagcagcgggtgttgaaattgtgtacgtgtcactaaacgcttcaactgagacggatttcacaaaattaaagtaagtatttgtattgcctagtttctgaataatttcattaattgcgtctaaatcatcgcttccaccaacgctactaccagctgagaagtcatccactgccgtcgagcggctactgttagaagctaccttatcaatgtaaaaatcatcaaaagcaaccccattaaattggtcaaaggcccattcactgggcattggaaacccgagattacccgaaaagccagtagacatatcggatacaaaagctttttcggctaatccatccacaataatcgtattggcgacgtttcttgtggcgtaaataccaacttgaaacccgaaactactgatcccacttgccacgccagtgaagtatggttcgaccgtaccagctatgtcaccatcctgaatatcgacgtccacggcaaagtagataattgtatcatccgggaaacctaattgcatcgctgctaagccagctttacgcccatcactactgcccttagtttgagtgaagtagtcttcatcatcggatgcaccgtcttgataaatagggaaaattttcaaaccagcattagttaatatactgatttcactggtggttaggtttttatcaacctcactgcttccagtaccggctgtcccagttaagtagcgaccgatgtatttgtaaccagcagagctaagtgcggcggcttcactagcatcaatttggtgagatgtctcgcaagcaacagcatcgcggtcagggttaccggcagaggttagaagactcatgaaaacgtccaatcctgctgatgcaccagttgtttctggtagggccatatcgttttcaaaagttgctactgagcttgatacatctaaagaataactgccatcaaaagcccccgtatacgcttgattatttacataaaggccccattgtagtatacgaacaagattattattatcaccagttgaaacagttggagtcagttcttgcgtcattggcccataagttccagaggcagtgtcggtatcaagtccttcttcggcttgtaaagcataaatcaaagcggtgtttgtatcgcgttgataaacgccatcacagggtagaatgccagtataggcgagatagtcatgatttaattgttgttgcatcgtacggatcttttcatagccatccgcaaccagggtgaaggcgctcatattgagtagggcagccatgaactgagaatccagggtaccggatgtatcacttaatccagcgtattccttcatggttgtaactgccgatacagtatcgctagtgaactcgccatcaaaagcggcggaatcaatgcctttacaccagaaaccaccctgtataatatatgcgatattaccagaataaccaggtacaatatcatcagcaatttcatcaaagagctttgcagttgttggcccaaagttatcaactaaatcagtgattcccagttcatactgtaaaccacgagtaagaccgtaaattgtgtcccagccagtaagaccattttctggaacactaccaaatccagcgacgtcaccgtacgtggagtttaaccattgttgagtatctaatactagttgatcagccgtagacacgcctccgtagatttattttgataaagctttattatggactgtttcaccggataaacaagtctagctataaaacatcacctaaatttcttggaatgttcataaattcaaaacgtcatctttggaaatttagtcatgcaatcttctataattggatggaaaaggtgtttttatcaataattcaatgatgcaagatttggaattactgttgcctattcccaaaactatgataattaaatctaatgaccaagaaattaccgcatccgtcacagatttaaataactggctatgcaaggacttggaatggaaaactccaagtgaatttttttcagtaagtgaacccttaaaattggacaatttgtcatagtaaaaaggactgcttaacttgattttaagattcgcttagcttctttattgaatagggttcgaaaatatctagttggtcataacactacaatataatagtgataagttgttatttccatgaaaataatcagaaagtattttaggtttagtttgcggtctggtctgtgattttcaattgttggaacggaactgacatcgacttagaccgttgtttgtagttgatacaactagttaaagggcatgaaagataattgaaaactactgtatttgaagtttgacaaaagaatatacattttgttgattaatcgctatcattgttatgataactagtttaattgataaaggaatgataaaacgatgcagtcattaggagttattgatattggtggaacgaccattaagtttgctgtgtggcaagatcagcaattagttgctaagaccaaagttacgacgcccacaacgctagctgaattttacactttgctaaccacgcaggtcgcgcagatgaaacgcgattatcaaattgctggtgtaggcattagttcgcccggggctgtcaacaaggcaactggaattattgagggtgccagcgcactgccgtatattcataattttcggattcagccggaattacaacgccgttttgaattaccggtcagtatggaaaatgacgccaattgtgcggcgttggctgaattggcggatggggctgggaagcaggttgctagcctgtgcttcttaattgtgggaaccggtgttggtgggtcggtcattgtgaatcatcaaatttggcacggcgcgcacttattcggtggtgagtttggattcacgctcatgaatgaccatcagatcttaagtgagttaggcaccgcggtagctgttgcaaagcggtacaacgcgagccatccagctcaacctgagctagacgggcaagccgtgtttgaactggctgccaagggtgatactgatgctcaagccgaagttcaagttatggttcgggccttagcgcgggccatctacaacttacaatacagctttgacccggaattgatcgtgatgggcggggcggtctcaaataatccgcacctactcccagcaatcaatgctgaaattgaaaaattgcgggcaacggtcaaaattgcttctataaaaccagatgttgtggcttgtcatttcaccgatgaagctaatttacggggagcggtcgttgacttttgtcagacgtatctggacattcaaaaataaaagtctgaaaagtcgatggcaagcaagttattcgcattccaacgcaaacttacttagaatagtcataatgattataaattctaagtaaggaagtatggactgatggtaatgcgtgatctaaaatattggcacgaaagtcgggttaggcgtgctcaatgaccggtgggccgcgttagtactgatcaacctgaaggcggcgccaactgagattatgaatttgcgccagcgagttaggggccttagcacgcttaaactactgaatgttttagctaaattaaccgaattaggattagttgcgactgcagggaactatcaatttcagttgacgactgcgggcattagttttcaaaagcaactgcatcagttggaagtgtggggcgatcaaatgatcgtggccatgcactgaatataataagtattgactgtcgtgactaaaagctggtcgtaatccacaattatgggattatgaccagtttttagtttggtttctagttattatcggccccaagcggacgatcggaaaagagatggtaagctgcggtgtagcggctctgaacgataatgttggcaaccacttcaggtggctccggatgggccttggtcagccagtgctgaataattgccagcacgccactaaagtagattggcatggcgtagtcagccggaatcgactggaaatattgatgatttaagggcgcctgctcagtagtggcgagtaaattatcaatgagaccggcctgaaactgatcaagaaactgtggatcaccatgggggccaagcaaggcctgaaaactagctaattgggtgttgatattcgttgttaattccagataggttggataagcattccgcgggtcaggatgaaccaaggcagcttgaatcccttggttaaggacttgctttgaaacggttgcttgttcgattaaagcatgttcgaaagcgtgaatgaagtcgtaaatatcttgaaagtgactgtaaaaactcccacgactaacgtgggctgctttgacgaccatggtgacagtcaatttaaagatgggtgtcgctgtcagtagtgttgggacagttgcgaacattttctgtacggcaagcggatagttagttgtcatcatgtcacctcctgtaaatggtcaatttgacatcaattgtacatttccaacgcactcgtttggtcttagactatggttattctaaaaaacgaggtgcagctaatgtcaaaaattgattttcatacccactatttaccaacgagttacgttgaggcactaaagcgtcatgttccaggtgatcctgatggctggccgacacctgagtggacaccacagcttacgcttaactttatgcgtgataatgatattagttactcgattttatcgctatcatccccacacgtgaacttcggtgataaggcggaaaccatacgcttagttgaagcggctaacgacgatggtaaaagcttggcccagcaatatccagatcaattaggatacttggcgagtctaccaatcccttatgaactggatgctgtcaaaacggtgcaacaggctttggaccaggatggtgctttaggcgtcacagtgccaaccaactcacgtggactttactttggatcaccagtcttggaacgggtctaccaagaactagatgctcgccaagcgattgtggctttgcatccaaatgaaccagcaatcttgcctaaaaacgttgatattgatttaccagtgccattgttgggattcttcatggataccacgatgacgtttattaatatgttgaaatatcatttctttgaaaaatatcctaatatcaaggtgattataccgcatgctggtgcttttttgggaattgttgatgatcgaatcgcacaatatgctcagaaggtttatcaagtggatgtttatgatgtgatgcaccatgtttattttgacgtagctggagccgtgctaccacggcagttgccaactttaatgagcttggctcagcctgagcacctactttacgggagtgatattccatatacgccgttagatggctcgcggcaattaggtcacgctttaacaacgactgatctattaacaaatgagcagaaacaagcgatcttttacgataacgcccatcgcttactgactgagtaagtgatgttaggataactgttgaatttttggcgtgaccaatattaaaaaccggaacatctgttaattactggtgttccggcttttttacgttattgttagcataattagttgggctaatctgctgtacgggtaatgcaagtaatcagaaccctcgtctaaaaataaagtggctatggtgttgctgttttagccattgtctgaccgactgttgcggtatattcacgttcaccaagactgttgggatgtaaattatctttgacaaaccagttgtcgttgtcttgcgcaacgtatagccaatcaatgagatgcacattgttatattttttagcggccgcggcaatcaattgattgttagggtcttgccaatctttgcctggaacgcgggtgttgacccagtaaatctggtggttgctgccaatctgatcaatgatcccatcgatttcggcggcactcgttggaccgttcgtccccaagttgatcagcacgtttttctgaattgcattatcagcttttaattggctaatgacggctggtgcttccgacacttggcgaccaaccttggcgttaacgttaaaatggtcaaagatttgttttaagtcactcgtggtgcggaccatgattgaatcaccgatccccgtcactttaagtttgcgcaggacgtgaatttcactagtggataattgatatttttcaccaagggcactatccgaaacggcgtgtgtagcgcccttagttttagtattccccgtaatggcgttgccaatactgacaacctgttgcttaatggttggtgttggaatgattaatgcgccaccaatgaagacgacagcaaagattccgaccaaccaataaattaatttttgatgtttcatttggcacctccataccccgctataagattagcttaccaccattacagtgtcaattatgaaatttatcataaggtgcttaaagtggtgtgatggcaggtttgtcagtcggactgtctaagttgaatttgaaaagatcattggaaagtcaactggtgcttgttagactaaggctagtgcttttggaggtggttaaatgcaaaagaaaacggtgggactgttattagccagtgccgggccttttttgtggggaagctcgggaacggtggcacaacatctatttgacaccacaacgatttcgccgttgtggttagtggcggtgcggatgctagtatctggaggtctgttaattttatatggatttagtcgccggttaccggtcatggtcgtgtttcatgactggtgggcaacggtgcgtctgattgtgttcagcctgttcgggatggctggcgttcaattgacttattttatggcaatcagtactggtaatgcggcgatggccgcaattttgcaattcttgtcaccggtgatgattattatctttatcaccgccacgacttggcagcttccagggaaagtggatgtcatttctgtggtctccgcaatcgctgggacggttctaatcgtcacggaggggcacactgactcgctggctttgccagtaattgcaattatctggggattgttggccgcggttggtgcaaccatctacacattaatgccaacaaaattattaaaagtgtatggcgccacacccattgttggttggtcaatgctgattggtggtggcttggtgctagtcggaacaggtgcttggcaccattcgccgcagctaacctgggtggcgtggggacaagtcggcttcgtcgtgatttttggcacgatgctggcctacttgttctttttacagagcttggaatacatcctaccaacgactgctagtgttctgggagctattgaacccctagcagcaaccattttaagcgtcttatttttgcacgttcactttaactgggtcggactgattggggcgataatgattgtcggggtaactattttgcaatttgcagcgacacgcgccaatcagtttgtctctaagtgagcattgattggtatagatggggaccaaacaatatatgaacatattaatcgttttattcacaaattctattgaaaatccatcttgctagcgtatacttttcgatgaaggatattatgttacgagggggatttttttatgaagttaagtaagcggggactattctggctacttgggtttatgcggtccaagttgttatgcggtattagcatctgtttccaggtgttatcccccgcttctgggcaggtttcccacgtgttactcaccagttcgccactcactcaaatgtaaatcatgatgcaagcaccaatcaataccagagttcgttcgacttgcatgtattaggcacgccgccagcgttcgtcctgagccaggatcaaactctcaaattaatgatgagttctaaaaagctcatttaatgttgtactaaaatttatttgctagcgaattgacttcgcaaatgttttgctcttgattcaaaatcaagagaccctacacatttgattcgtcgaaactttgttcagttttcaaaggtctaaatcgttcgttgattacctcaacgcaactattaaagtttatcatcatcagaacaagctgtcaacatctttttataaattgttttgaataactattcaatgtaaatgctcacatcaatttgaatattcataataatgagtaatgttgcatatcgctcttaacgacaagaaatataataccaagaataacgacccgggtcaaccctttttatgaattaatttcagaaaagttttaaacaccgcttaatgtcgcaatagactatattctacggggtttttattaagatagcaagcaaaagttcaataaatctccctttaattttcaacgactgtttttcaaagtaaaccaacgctagcataatgaatattatttcgctgacaatctaccaaatcaagacaaccaatcagtcagcatccccacctcatcaccgtactttatcggttcacaacatccgcgacgcgcctaccattccaactttgcatttacttgggactccaaaattggtaatacttcatcgttcaccatcagtgtcaattcacactgcgcaacaatcggcttaataatagtgtaccgcgctgtggtcaaaacaagtggcagcttatttccgcaaccaaaaagggataacgccgtcagcgttatcccttagttgatacgagttcgattaatcagaactactgcttgaactactactactgtcacttgagctagacagttctggtgcatccgtcttatacagactctccgttgatttgcccttatgcttcgagagaacactcgtcttcttctcagcttggatctctttcaatgatttgagggtcttagtcagcttataactatagtccgacttattgaccttcttaaagcccttaggcgtgtagaaccgtagtaagtcaccctggatgacccgatcagagagtgagagttccgtcgtcacatgattttgcatctgtttgacagtatccttctgcttcgtcgtcatatccgttagcttcttaccggtcttcgaatcatagactgtcccactgatcttcgtatatgtcggtgagacaaaatccccgttccggaaagccactgtctggttatgctgtttcgacagtaagtccgttccgaactggatgtaacccttgttcttgatccctaacaggtcaaaaatcgttggcaacgcatcaatttcaccaccatacgtgtggttaataccacccttgattccttcagaatgaatcataaatggtactttctggaattgagccaagtcgaaactcgttaccgactttttacccaataactgtgcaatggcagccttatggttgtttgaaatcccataatgatctccataaagcacaatcatactattcttatataagccggccttcttcaagtaactaatgaattcggcaaaggcttgatcaagataatgggccgtttgaacgtagccatcaacggttgaatccccggtcgtcgtcttatcgatcgactggttcttcttatccaattcgtatggatagtggttcgtcaacgtaatcagctttgcgtagaatggttgtggtaattgctccaaatacttaacagagtctttgaagaagattttatccttcaagccataaccaatattgtagtctgacttctctttatagtaagaagagtagaagaagtagttatacccccacgacttatacgcgttatcccgattccagaaactagccacatcaccgtggaaagccgcagtcgtatagcccttttgtgacaggattgctggcgctgcctggaacgtattcgacgtcccatactgcgtcatcgctgacccggttggtaaaccaaacaaggagttttccatcatcatttcagcatcagaggtcttcccttgcgccacttgatggtagaaattatcaaaactcaaagtactcttatcatgatagaacttgttcaggttcggggtaacttccttaccatcgaccttataatcaattaaaaattgctggaaactttccaaatgaatcacgaagacgttcttgcccttcgctttaccaaagtatttgacgttctcgccagcctggtttttcttgaggtaggctagcacactcttcatatcactactacttgcttgggcgcgcgtcgcactttccttttcggtctgatagaagctataccctgcatatgtgttgagtcccaagtacttaacgatgtagttgttatcaaaagtccgcgtcaataaatctgaacggtcatgttcagacatgccgaggtcaacagcaaacaacgccaccccaatcatggtcagtgttgcagcataccgaattttgaaaggccgtggatcgatccgaatgaccttgaaggctaataacagaatcagcaacacgacatctgcataaactaggaagtcggttccatgaatgatctgtcccaaactctttccgaggttattactagcagcaccggaactcttaattacccccgccgacatgaaatcagagaattcccggtaatacaagatattggcaaataaccacgtcgtctgtagggcgtcaatgatcatcataatccaatactttaagcgaccacggaaatatagggcaataccgagcagcacgatcgctgtcggaaatggattcaagaacaagataaattcctgaacgggtcccttaacccctaaagtaaactcgctcttataagcgatatatgtctttagccaaaataagaccacggttaggaggtaaaagcccaacgttgtgttgaccttcccaaccgtgttttttataaatttaggcatggtaatttcttcctccgttattgctattaacaaatccatattataacggttgcgtactagttagcaatatcttgaagatttcttcaaaaattcttcaacattacaacgcgtcataatatggatctatcgaaaatctatctggattttgggggaatctagttatccgttagcaaatcgtataattcaattgccacgaggtcaatgttatcaaattcaaacgtttggtctggattgaattcttgtaacgtgtacgtcgaggtagcgggatcatacgctacttgcccacgttgaacgccttccttttcgaaccgccgtgattgcacttcggttgcttcagttgtgcgcatggcttctagtcgtttgagaattgctgatagttcagatttatccattatactaatctcgctccttcaagttttgtttacattctagcaaaaaataggactaataacacgtttttttagtagaaagcccatttttaccacaaattttcacacttataattataccctaacttcctgctaagacggtgagaagttgtgctaaaattagaacaacttataaattaaaggagttcggatatatgacactatttagagacgatctcaatgaaaccatcagtcacattcaagtttcaaccatccgccagtttgacgaagaagttagtgcgatacctgatatggtcaagttaacgctcggtgaacccgatttcaacacgcctgagcacgttaaagcggctgctaaaaaggcgattgatgacaactactcccactatactggcatggcaggtctgttggagctacgccaagcggccgcccactttcaagagacaaagtacggcgtccactatgatgctgaagaccaagtcttagtgaccgtgggagcgactgaagctatcgcaactgcattaacgacgatctgtaatcctggcgacgccattatcattccgtccccaatctttccagcgtacatccccatcattcaagaagcacacgccaagcccctcttcatggatacaggcgttaacgattttgtcattacgcctaagatggtcgacgattttattgctgctcatcctgacgagaacttcaagggaatcgtgttaaactacccaaataaccccactggtgtcacctatgttgaagatgaaatcaaagcgctcgccgactgtttccatcgccataacttgtgggtcgtatccgatgaaatttacagtgaactgacttacggtagcgaccacgtctcaattgctaaattcattcctgacgaagtgatcctgatcaatggattatcgaagtctcatgctatgactggctggcgaatcggcttcctgtttgcctctaaggaaatgacggcccaacttaaaaaagtccaccaatactacgtcactgcagcaaccacgattgctcagaaggccggtgttgaagccctcaccaacggaatcgatgatgcgcaaccaatgcggcaagaataccaagctcggcgtgatttcgtttatcaaacgatgtcgaagctcggtttcaaaatcgcacgtcctaccggagccttttatatcttcgcgaaaattccagctggctttgaacaagactcgatggcattctgtaaagacttagcacgcaagaatcagctcgcgattattccagggactggttttggtgccgagggggaaggctacgtgcgtctaagttacgctgctagcatggaaaagctccaccaggccatggatcgcctcactgcatatatgcaggaacctgctaaccgtatcaactaagcaacgacagtccaccagctaactgtcctagttcatcactgttagtcatttcaatgactgaattggattcaactcaaaaaggtgcgccaactactcgtaaattacgatagttggcgcacctttatttgtcttcagcatcacacgatctattaagcgagcatcactttgcgaacgcatacgtgcccgtggtggtccgttttgcgggcgctgttgcccattgaagtgatccaagcatcgtcagcgcttcaggcgtccgataaatgacttccttcgccgttcctgacaatggatccgtcaatcgcaatttaagaacggccgtattagcagccagataatttggcgctgtccgatgtaatggccacaaagcaattttggtctgcgtcattggctgcttactattcacccacagttttgaattgtacttcgtcaccagacgcactttggtctgcgtccccggaatctgataattgatgctcttaggcacaacctgtttatactgctcggtcgttttgagcatcagccgcaagttgttgttcgccgtaaactgccacgcaccgccaagtgttgttgcaatcatccggtggccgttctgccggtatgtagcgactaagcaagcaccggcctgattcgtataaccggtcttcagtccatcgactggcacgcggggatcatagtactcggcgcccttcaggatctccaccgaagttgggaccgtatacttatgaattttgactgaacgttgattagcaacttgaataacatcggggtaagcatcaatcaaatgttgtgcaatggtcgtcacagcccttgctgacaccagattttggtcctgatcgctggttcccttaatttttaaatcgtaatttttcaaatcagtattatcaagtcccgaagcgctaataaaactcgcatccaaatgccatttggacgcttgttgattcattaatttaatgaacttatcattactgccagcaacatactcccccagcgcaatggcaccactattcgaagaccctaccaaggtagctgcgaataactccctaaccgtaaacgtctccttggcgggcatcggcattacggataaagttgcactggttgccatcttacggacatttttgcgaattgggactgcatccgtccacttgatctgaccatgctcgatggcccgttcaactaaatacagcgtcatgagcttactcaaggacgcaattggtaatttctgatcggcattctgtgcataaacgacctgaccagacttggcatccatcacgtaggcggctttgacctcatccgccttactactggtcgcgtgtgccgctacattgcagctcaacaccccgctgactgtcgctgtcaacactagtccccataccaaccgttgtttgattaactttaacatagtaccttcctttaattcgtaaccgcgaaaaatgggtcgaacaatgatgtcggcccattaaaattactgttcttgtgaatccgaccggctaggtgccgcaatcggaatttcttctgctttttcaggccgcatcgccatggcgatcatccctaagaatagtcctaaataatacgttaagatccgccagatcagcatcgctaaaatcagcttactgtggctgggaatgaacttagcaaacaacgccgtgaaaccaaattcagcaccaccggccccacctggaatcgggaatagtgatgtcactaagaagatcaacacgttcaaactagtcaccataatcaaattaacatcatcgattcccattgcccgcataataaaatacggaatcaggtagtaaaacagtagctgtaagaaggtgacgatacaaacttcgaccagcatccgccagtccttggtcattcgaacgctttcttcgtagaacgaatcgattttttcactaatattgttttcgaacttggcaaatcgctcagctttcataaaccagctgaccgggatcaagacgatcttcaccgctcgttttgtaaagttgtaccagtacatcaccagcaacagaccaacaatcaccgcaaagtgaatcagaaaacctaacaaaacgtatagtgacaggtaacttaacttttcagctaaataatgaaaaccaattaacatggcgaataagaaattcaataccaccatggcctgaaaaacaacaaacttcatcaatgcaactgaacttgcccgcccagcgtcaatccctgattgtgccatcacgaagatttgggcaggttggccacccgaagaaaacggggtgataccgttgaatagttgctcggctaaaggaacgcgcagggcactcttaaagcgatagttccgataacggtgcctgacaaacttttgcaccaccacggcttccagaccgaagtatagtccgacacaccctaacgcaactaataaccaccaccaattcaaagtgagaatatcgtccattagattgcttagtttgacattgcgcagtgagtaccacgaaatgccgacgcctaacgcaaccattacgagtaatgaccagatattttttcttgtcattgactacccctcttttgcctgttgcaaataaaaatcatgccaaactttggcaaggcgctcttccgaataatcctgagcagccaaaaccgccttgtcatgcaagaattgcaacccggctggattatggcgtaactggtcgatctgtcgttgcatatcatcaacatcactggccgcttgatagtagccatcaatgattgcccggtacaaatctaaatcccggagcaatactggtgtcccacaactgaaagcttccaacacggacatcggaaataactcgttataagaaggcagtaagaaaagatccgccatattataatagtccaccaatttctcacgaggaacgatgcctggaaacgacagattagctggcgggttatccaccacctgcttcaactcctgataaccatccgtaattcggccaaacgagaacccaccggcccatacaaactggatatctggattctgctttgcaagcgtaataaaatcaggaacacctttccgatcctgaatctgaccggtcccgataatcatgaatttattttgatcatagccgtattgttggcgcaagcgcaactgtttagccttagtcatttcgtaaaattcacgtttgctgacaaaattcggaatatacgttacatccgctcttttgatatggtatgcttccaattttggaatgaaggtcgggttcaccaccacaatgtggtccatccgcttataaaatgagattaaataacgattgaaaatcatttggaatggtcgtggcaacttcaagctaccctcgagcgtctctggtaagaaatgcacgtaaccgattttacggcctcgattaggcataaacgtagacaggtaaaacattggattaaccgtatggtaatgtgaaacggcggagcgcccatatcgattgactttaatattaaattcatcctgccaatgggtccgcaacaaccgcatcaattctagataggcgctgccgactccctgacccttgacggagtcagcttttgaaaacatggtaatgtctaacataattcgtccccttacgcgtcatacgtcgaataagcatccccgttttggcggtgctcattgacgatttgacacacgttaattactaatattcgccgatttatccgctgattcagaatacgccagctgtacgtcttgatagtagttgatcacttgcttgccgaaatactctgcggaaatttggtaaagcttcttctgccgtggcttgggatcgttaaaagtattgggatgttgtaaataacgcacaacatccttgatcagatcggtctcacttgtaaaggtcgtccccagtgacggatcatcaagtaattgatccgtgtacggactagcagccactaccgttttaaggccagcagccattgcttcaatgtacgtcagcccctgtgattctgagttcgaagccgaaacgaacaggtcagccatctggtaatagttataaacttcatcattatcaatttcaccggtaaattgtacgtgcgccgttaagccggcgtcttgaacctgattttccagtgtttcacgtgccggaccatcacctacaatcaggagttgggcattcggcacctgttctaagatcgccggtagggctgcaatgacttcgtgaatgtttttctcgtaggccaaacgactcaaggaaagtaatactggcgtatcagactgatagccgagtctttgccgataatccaccgtcgactgctgctcgtactgattaatgtcgattccagtcggaataatgcgaattggcgctttaacgccgtagcccgtcagtgtatttgcaacccgctcactcggtgctacaatcccgttcagatgataacaatacgcccgtgtggcctccttaacgtggtatggctttaacaacttaccattcgcaatataatgtagataatcctcatacatcgtgtggtacgtatggatacatgggacttttaattgtttggcaacaaacttaccaatcatccccatggagaattctgtctgcgtatgaacaatatccaggccaagatccttagcaacctggtaagccttaaaaagcccgcgaacggcgatgcgccgatccgtgaacgaaacaaatggaatactcgtaaaccgaaaaatattgcgttcataaatattcttatcaacatggggatccgtggtcgtaaagatatagacttgatgaccagcccgttcgagttgattgcgtaacaccttgattgacgttgcgaccccactcacttgtggatagtatgtgtctgtaaatatcccgatattcacgtagattctccccttatttccatcaattaaccgtgctgctaatcgatgttgcttaaccgcgcttagatcattatttcatgatcatcacgaattcgacttaatgcctatattataaacattatattggttaaatatccgagttgcaaataatcttaatataaattaagagttcatgacaaaatctatctgaccagctacacctatagaaaatgaattcgaaatgatgaattgtaatcgctaggcatcactcaacaccgccattacatcgtttccactacaccaactcttcaccgtcaacagcgagtagcaatgtgccctgtgtccatcattgactagcgcgcggtcgcaactatggacaattgtcacaatgcctaaatgtccagtcaattcgcgtcatgtactgtgccagctctcatcataccggtgcgggtagcccactccccgtcgtgctaaacccggggctagtacaaactggttaatgacccgcatttacccacaaaaaaagagcaaatccacagatttgctcttagtttgattgtttatttaccgaagacgttcttttcaactaattctttgacttcttcgttagtaacacactcgttaagtgccttatcagctaatttagccatttccttagtatcaagtttcttcattaatgaacgtgtcttaagcacggaagttgaactcattgagaattcatccaaacctaagcccatcaataatggcaccgcaatctgatccccagcaacttcaccacacatacccgtgaagcggccgttcgcgtgagcagcgtcaataacatgcttgatcaaacgcaacaacgatgggttgtatggttgatacaagtatgacacttgttcgttaccacgatcagcagcaaatgagtattgaatcaagtcgttagtcccaatactaaagaagtcgacttccttagcaaactggtcagctaaaatagctgccgctgggatttcaatcatgataccaagcttgatgtcgtcagcaacaggcgtaccagctgcaaccaacttggctttttcttcctcaaagatagctttggctttacggaattcgtcaagcgttgcaatcattgggaacataatccgtaattgaccgtaatgtgacgcacgtaataacgcacgtaactgggtccggaagatgtcatcacgatcgagggaaatccgaatagcccggtaacccaagaatgggttcatttcatcaggtaatggcaagtaaggtaattccttgtcaccaccgatatccatggttcgaacaataacgggtttgccgttcatcccttcgacaaccttcttgtaagcttcgaattgggtatcttcgtcaggtaattctgaactgttcatgtacaagaattctgaacggaataatccaatggcttcagagccagcatccaaaaccccatccatatcgtcaggtgtcccgatgttagaagctaattcaaagtgcttgccgtccttagaaacggtggcctcgttcttcaacttagcccattcagccttttgcgcaacaaagtctttagccttttgttggtaatcagcaacttcagcatccgttggggctactaaagcgtcaccgttgataccatccaagacgaccgtatcgccttctttgatatcagtcgtggcagattcagatccaacgaccgctggaatttcaagcgtccgtgacatgatggctgaatgactagtccgaccaccaatgtcagtaatgaagcccttaacatacttacgatcaagttgagctgtatcactaggtgttaaatcgtgggcaaccacgattacttcggagtcaattaaagctggacttggtaaggttacccctaacaagtggcttaagacccgcttcgttacgtcgcgaatatcaccggctcgttcttgcatatatgcattatccgtcatcgcttcaaacattgaaatgaaagtatcagtaacttccttcaaagcttcttcagcattgactttatcatccttgatcttaccttcaatttgtccgagcatttctgggtcagacaaaatggtgatatgagcttcaaaaacttctgcttcttcttcacccaagttttcaaccgctttgtctttaatgacctttagttcagccttggaagcatcgaaagcgtcatgtaaccgtgcaacttcagcatccgtatcggaaactgttgtcttttcgaatgataaatctggatcaactagcatataggccttagcaattgcaacaccatcactggccgcaattccttttagtaccttttcagccattattcagataatccttctttcttcatcgtttcagttaaagctgcgatagcgtcggcttcgtcggcaccttcagcagaaatggtaacgtcagcgtctttaccaacaccgagtgacataacacccatgatggactttaagttaacggacttgtcttggtattgcaacgtaatttctgagttgaacttacttgctgattgtaccaataaagttgcgggacgtgcgtggataccagtgtctgcgataacgtgaaattctttcttttccataactattcgatctccttcaagataaataaatttaaaattggttccgagtcaattcgagttgccgccaacacgtatactcaagagcccttaataatgatgatagcaattatccaattaaaatacaagccctttcattcaagctaggcctattaattggttgtcttaccatccttctcgaaatggtaaacaatgcggccatctaagtccgccgtaccaatgactcgtttacgatactcatacttcatataggcatcgtgaaaagccataaattcatccggcgttacggtaaaactgtcgcgttcgccatgacgcaacgcttccattaactgggtataatccgttgccaaacaattaccgcctcctcaaagttaggttgacacattactgcatcattattttgatatttacgaacaaagttctccgccgctcactggctgttgacggtcaccaatgaaaaacgatgcgctgcaaacatcaaaactggtcaggctcgatacatgcaaaaaaaccgctttgtactataatatagacagacagttacatcatcacttatcctaaccagataattaatatacaacgaatccggttacatgacaagctatgagttgcgactatccagactattcagaaataattgaatcaatcagccattgcgaattatcccggccgcacgtccagttttgaccctgaggcttttcacttgcaacagtccgtaaattcgctatactaatagtcaaaggtcaacaaaggtcaaagagccgatgaacctttaactatgatcctaatcgatttagttatatttctgatgcgaaaggtgtgtgacagcataatgctttgtgacaattgccataagaacgaagcgacgatccatttatatacgagcgtcaacggtcagcggcgacaaatcaacctttgtcaaaattgctatcaactgctaaagaatcaggaacagcaaccaaataacggagttggaggtgctgatatggcacaagatccattcggttttggtggtcttgacgacattttccgtgcaatgcagggtggcgttgatcctaataacgcttaccggcaacaacagaccccaccgacccagccagctggtcctaatggcggcaatcgtcgtggcaataacaacggcggtggcctccttggccaatacggcttcaacttaacagcgcaagctaaacagggcaaaatcgatccagtgattggtcgcgataccgaaattaatcgggttatcgagattttgaatcgccggaccaagaataaccccgttttaattggtgaagctggggttggtaaaacggcggtcgtggaaggactagcacagaaaatcgtttctggtcaagttccacaaaaactgttagataaagaaattattcgtttggacgtggcttcccttgttcaaggcaccggtattcgaggtcaatttgaacaacgaatgcaacaattaatgaaggaggttcaaagcaatccgaatatcatcctcttcattgacgaaatccatgaaatcatgggtgccggtaatgctgaaggtggtatggatgctgggaacgttctgaaacccgcccttgcccgtggtgatttccaattagttggggccacgacattaaacgaataccgcgacatcgaaaaggatgccgccctcgcccgccggttccaaccggtcacggtcaacgaaccgagcgtggaagaatctatcaagattctcgaaggcattcagaagaagtacgaagactatcatcacgttaaatacgatcaagatgccattgtggcagccgtcaagttgtcaaatcgttacattcaagatcgtttcttacctgataaggccatcgatttactcgatgaagctggttcacgtaagaacttgacgttgaagacggtcgatccaaagacgattcaagaaaagatcgacgaggcagaaaagcagaaacaggacgccttgaagaaggaagactacgaaaaagccgcctactatcgcgatcaagttgctaagttagaaaaagctaagcccgatgaaagttcagaccagcctaataacgatactgccactgtaacggtcaaggacatggaacaaattgtcgaagaaaagacaagtattccagttggtgacttgcaggctaaggaacaggctcaaatgaagaccttagcacccgaccttaagagtacggttattggtcaagaccaagcggttgaagcagttgcccgggccatccggcgtaatcgaatcggtctgaacggaactggccggccaattggttccttcatgtttgtcggcccaaccggggttggtaaaactgaattggctaaacaacttgctaaggaactgtttggttctcaagatgccatgattcggtttgacatgagtgaatacatggaaccacattcagtggctaagttgatcggttcaccgcctggctatgtcggctacgaagaagccggtcagttaactgaacaggttcgtcgtcatccatatagcctagtcttactagacgaagttgaaaaggctcatccggatgtcatgcacatgttcttgcaaatcctcgatgatggccggctgaccgactcacaaggtcggactgtcagcttcaaggatacgatcatcatcatgacttccaacgctgggactggcgacagtgaagctaatgtcggttttggtgccgctgctgaaggcaagacgcacgatatcactagccggttgacggactacttcaagccagaattcttaaaccggttcgatgacatcattcaattcaacgctttatctaaggaaaacttgatgaagatcgttggtttgatgatcgaagacgtcaacggtatgttagctaaccaaggcttacacgtccacgtcacagaacctgtcgaggaaaaactcgttgaactaggttacaaccctcagatgggggctcgcccactccggcgtgttatccaggaacaaatcgaagatcgcatcgccgatttctatttggaccacggcgacgttaagaacatggttgcaaaagttgaagacggcaagattgttttggcggctgagacgaagtccgaataagataattaaatttagagccagaagcgtaaacaatcgtttacacttctggctcttttttgtgcctacctcaaatcctcattgagtcgctatgaatagcccgcgtctctgccataattaaacgcctaatttaaagtcccataattgtcgttccaaattatcacgctcaatgccaatatagcgttttgtcacctgctcgctcgaatgattgaaaatcatcatcaatccggcaatgtcacgagtcttttgataataatgatagccaaatgtcttgcgcaacgtgtgcgtaccaatatcatcccgctccaggtactcaccggccgtctgaaagactcgatagacaccattaacggttaaagctccgccccgaccactacagaataacggttcatttgccccccgataccgcgtaaagtgggctaattccgttttgaggtttttcaaaaacaaccagcgcttcttgcccgttttttgttccatgatcataacacgatctttgccacgtacttgcccaaccttcagtcgtaaaatatcactcattcgtaatcccgtgttaattccaaccaaaacaatcatgcgattacgttccccataacgcgcttgtgaaacagcccataaaaaatcatcgatttcttggtccgttcttagcggttcaacattataatgcatacgctccattacacctcaatcaatcttattaagtttaaattacttaacctagagtaaactaaacaaagtaattgttaacctataatgctccccactattaagtgctaaaacaaaagcgcgggacaaagagtctcccctttatcccgcgttaaggatattacttcacttaatatccgtgaacgtgtacatctgcctataattgcaaagctgataattgatccgctaactgtgttgctggcgtcgtgtcaagtgatttagtcaattgtgcatcaacatctttcattcgatcctgaccagccttcgtaagcgttaagacccgtaaacgccggtcttgtttaattggttgacttttcaaccatccttgggttattaaggtgccaatgttttgtgccaacgaggctttcgccacattcaacgcatttgccacatcaccaatctggataccaggatgttgttcgacataaactaagatccgtaactcgttcaaactaagccctgtggcggacgaccagttcgacgtaagtcgttttaagtcccgttcaaggtgcatgatattcataatataattaattggttgttgcatactaacagcatccttcctgaaatttgcacttttttcattaaccgttcaaaacaagccattgtcccttcgcatgattttttaaaaaaaatagtgcgaattgattcctgttaaatcaatatttttgatacgattcgtcattgccgctcgataaccgtatccttgacgacctcaattaagtcaacgtttcactcgcaatattttttttaaaaaatggtgcgaatcaattattaagacgaatagttatatttgttaacaaactttattaacaatattattattgcataattacaaaatttacacaaataactttgactaccggtcacagtttagctggtcaaaaatagccgtctatccccgatttaatcggctttttgacaattgattccatcaatattttttacatattaaatttatatgtcaagttaacatgagttaattataatggttattaattaataaacttatctaaacagttaattaaatattctactgaataataaaacagacgtcgagtattcgcactcgccgtctgttttattagccgttactcagaaaattccgtaattaaccccgcgtcaacagcccgcttggtgtatatcgggatttcgtcttcagttgcccggacaaagtgccctggtgcaatttcgaccattcgccgcttcttaccgtcatgttcggtcgtttcgtcataaggaacctgcttacggttacgttcaaactctggatcaggtaccggcaccgccgagatcaaactctcggtgtacttgtgtaacggatgattatacacttcatccgcaggcccaatttccagaatcttaccgtaatgcataacgccgatccggtcactgatatacttaaccattgacaaatcatgcgcaataaataaataagtcaagttctgcttaacttgtaattccttcatcaagttaaccacttgggcttgaatcgaaacgtccagcgcagaaattggttcatcagcaatgatgaatttaggctctaccgctaacgcccgggcaatcccgatccgttgacgttgaccacctgaaaattcatgtggataacgactagagtggtccttgttaagaccaaccgtctccaataagtcttcaacctgcttggttcggtctgcatcatccttggctaaaccgtgaatatcaatcccttccgccacgatatccttgactttcattcgtggattcaatgaggcgtatgggtcctggaaaatcatttggatctcccggcgaaattcatggcgttccttcttggtgtgtaatttggaaacgtccttaccgtcaaaaatgatttcaccatcagttggttcatataagtgaatgatggaacgtccggtcgtggtctttcctgaaccagattcaccaactaacccaaatgtttcaccttcataaatgtcaaaggagacgtcatcaacggcccggacttcatcttttttgccgacattaaaatactgctttaaatggcgaacttctagaatttttttacgttcatcaggcatgtctacttactcctttgctacgggatttgaaattggtgcttgcggtttttgcatggccgcaaacttttgctgacgccgaacgatttcagcaggtggcgttacctttggggcatctggatgaagcaaccaggttgccgcgtaatgggtatcagaaaccttaaagaatgggggttccttctccgtatcaatcttcatcgcgtaatcgctccgcgctgcaaaggcgtcaccaactggtggttccaacaaatctggtggggtccctggaatcgctaataatgagccactttcagtatccaaggttggcatcgaattgagtaacccccaggtataaggatgttgtggattgaagaagatctcatcgactgtcccgtattccacgattttaccggcatacatcactgcgacccgatcagccattccggccacgacacctaagtcatgggtgataaagataatcgacgtatcaattcgattttgtaaatccttcatcaagtccagaatctgggcttgaatcgtcacgtccaaggcagtcgttggttcatcagcaatcaggacttcaggatagcagaccaatgcaatcgcaatcacaatccgttgccgcatcccgcctgagaattggtatggataatcattgattcggccttcaggattagtaatcccaaccaatttcaacatctctagcgcttgggcgatcgcttcttttttcttcaaacccttatgtttcatcaaaggttccgcaatctgcatcccaatccgcattgttgggtccaatgatgtcattgggtcttggaagatcatggcaatatccttaccacgaatgtgttgcatgtctttttcggactttttaataatatcttcaccgtggaacataatgctcccacgtttaatttcagcattaggtgctaacaggcccatcagtgaacgtgtcgtcactgacttaccagaccctgattcaccaacaattgccaaggtttcacccttacgtaaatcaaagctaacgtcacggatggctttaacttcgcccgcataagtatggaaattgatttccaagttgcggacctcaatcacattttctggtttttccatagtgctgccgtcctcctaacgttttgactttggatcaaacgcatcgcgcatcccgtcacctaacaagttaaaggcgagcatcaagatgatcagcacgatggctgggtaccacatctgatatggcaagaattggaagttcttctgcccatcagagatcaacgtccccaatgaagcttgtggtgaactgatcccaatcccgatataactcaagaacgcttcgaagaagatcgcacttggtatcgtgaacatcgtttgaataataatgacacttgaaaggtttggtaacaagtgtttccaagcaatcttgacgggtgattcacccagtgtccgtgcagccaaaataaagtcttgattcttcaattgcaaggtctgtgctcgagtcagccgggccatcgtggtccaaccagtgatcgcgatagccgcaatgattgaggccatcccagtcttcgtgaaggccgtggccatcaacaccatgataaccaattgtgggatggacgagaggatttcaatcacacgttgcatgaataaatcgacgcgcccacctttccaaccggagagtatcccgaatccgaccccaatcgtcaggtcaatcaaagtagcaatcaacgcaatttcaagtgagatccgggtcccatacataatccgcgccagtaagtcccggcccagataatcagtcccgagaagataatgcacgtcagactttgcaccggccgccgcatacgcatcaacgtccttaccagattgagtcaagtgaccattcaaaccatggatactaacacccggaatcttcggagggaggttcgcataccgtggcgactgtgcattaggatcaacatggtagactgcccgtccaccaaatgccactaagaataagaatactaacacgataaagctgataaaagcggtcttgttagacttcaatcgccgccatacatcttggccgaacgttaaggaaggtgctgcgatccgttcattatcaggacccgcttgtttatctaacggctcgaagtcgccgggcttaatatcgatactacttggattttctgccattaactagtccccatttccatttaaacgaatccgcggatcaataattccgtagacaatatcggtcaacaataatagtaagcaaaggagtgctgaatagaaaatcgtcacacccatgatggttgggtagtcgttaaccagaattgatttaacgaattgttccccaatcccaggtactgagaagatattttcaacaaccattgaacccgtcatcaaggcggcggccaatggtccaatcagcgtaaccattggaatcaaactgttccgcaacgcatggtgatacacgataccaaatttcgacaaccctttggctttagctagctcaatataatccgaactcagcacgtccaccatgtcggttcggataaaccgagccgtttcggccagcggactggcggccaaagctaacgttggtaagatcgtgtaagcgaagccttcccaaccagcaacagggaaccaaccagcctttaagccgaggtagtattgtaacaggatggctaacacgaaacttggaactgcgatccctaagatcgataagatggttgctaaacggtcggcccaagtatccttcttgatggccccaacggcccctaggataatcccaaagacgattccgacgaccatcgcttgaccacctaactgcattgatggtcccatccggctaccaatcaggtaactgacggcttgatcagagaactggaaggatagccctaagctccccttgaagatcccgccaatgtaaatgaagtattgcaaccaaacaggtttgtccaacccgtattgggccaagatcgacgccttttcgctaggggtcaatttagcttcattttgcagcggtgttccgggcattaacttcattaagaagaacgtggcggtcgccacaatgaataatgtcaggaacaagtaaaatatccgctttaaaagatactttctcatgagaattcctcgcattctattaaaatcaacttaaaaaataatgacatccctcattataaaacaaaatggtaaggattaacaatgtgtcaatccttacccctttgcttcacattcattcagttaaagcacacacacttttttctgtggatttacatcattattttacggacatgtacttgaagttgtagtttgagcccgcagtgttgtagatgatgcccttcagattgctccgagtcaacgttgctgaggcttgttgatagattgggatgaccccttgatcattcatcaattgcttttcagcagcaaccatgtcagcccaacgtgcagtcttgttattggcatcggcaccttccgccttcttcacagcatcgtcgtatgcggcactgtcatacttcccattgttgtatgagttgtcggacgtgaagagtgacaagaaggaaattgggtcggtaaagtcagcattccaggcagagataaccgtatcgaagttcccgttttgtgaccgttgaagacgggtcttgaatgggacgttctggttagtaacggtcaaaccaggtaatttctcccaagcaccttgaataaattcagtagacttcttaccaccatcagtatcgtcagaaagaagcttgatgttcagcttagtttcaccaatttctttcatcccttctttccacaacttcttagctttcgttaagttgtagtcaactgcagaaggaacggcagcgtcagtcgtaaagtccttaccagttgtcgggtttttagctaagtcttcagaaacgaaacctttagaaacggtcgaaccgttacctaacgtattattaacgtaggacttccggttaattgctaatgacaaggcctgacgaatcttcttgttctggaaagctttggctaaagtcttatcgctatccttacgattaaattcaacgtagaaagttgaagccgtcttccgaactaagtagttcttatcattcttataattcttaacttgttcgttggaaagtgtcgtaaagtcgagcttattggaattaaataagttcaagccagttgaaggatccttaacgacttggtacttgatgctgtccatcttaacagctttcttatcccaataatcgttattcttcttcaaggtccatgacaagtttgtcccagtccaaccagtcatcttgtaagggccgttataaaccatggccttactgctcgtcccatacttagaaccgtacttcttaaccactttttcattttgtgggaagaagttgacaaagcccatcagcttgtcaaagtaagcaattggcttatccaaagtgaccgtcaacttgtaatcaccatcagccttgattcctaaactagaaacgggcttcttgccattgacgatagcgtcagcgttcttaatccctgaatataagtatgcgtattgtgacgcagtctttggattaacggtccgttgccaaccataaacaaagtctttggcagtaactttatccccgttactccattttgcgttcttccgtaaagtgaacgtatatgtcttcccaccattagtaaccttagtggatttcgcaattccgggtgtgaccttcccgttcttaccgagacggtataacccttcattagtgttattcaacgcgttagaactaaccacatcggtggacttagaaatgtccatcgttggtaattcggctgattcggtccaattggccgtttgcttagaacttgaagaactcttgcttgagccacaagcagctaagaatagtacggatgcgccggcaacgacggttacttttgcagctgttttgaaattcatataacccaacccctaactttaaaatagtttgtgtgtgcttttccctcgaaaagttaaagtaattgtatattataaataaattaaaatcaatcctaaactctaatttttatcattatttcgtcataatcgtcttaattatttcattttgcgattattatccatactgataaacatgcctgaaattactgatatataagcaattatattctcacatcagtgttcaattatcaagtgaacacaatcggcaatttttcttaataaataattcaaataacgataaaaatgacgatattaggtcttttttacgttagtcaaaacagctaaaagtgcacaaataaaaaagaatgctgattttttatcagcattctcttattattaaacaatattggctagttaagtactcgtacatcggcataaaacacaccagcccgtgaatttacaccaacttagattctttccacattaacctcgaaacaagctggtagccattttagatgtgcgcccattttaatcacgactcaacctgattaatcagctccgtctagcctagttaccgagatacccaatcaccgaagcaacaattaagatgatgagaacaatcgtcgtaatccaaacatataagtggtctttttccactgcaaaggcgtagatagagaccgcaacccgcaaagttggcgttaaaatcaatagaaataaacctaacataatcacggcatatggtttaagtgccacaatgccggctagaatatcagcgaccgtatggggttccataccatttgcataaccaccattgccctgaatcaacatcagaagcatcccaataataatcacgattgcagaaacaatgacgccaattcgtagaatatacccaatcatcatttcaacggcgtgcatctcttgcgctttagttgttttttgcttatccattagatggtcaccccgaatcctttagcaatcatttgaattcccagatagagcatcacgggcacaaagatcatgcgaatcaagcgtggcttgagccgcgtcatgattcgtgagccgattaaggcaccgacgataatcccgatagctaatggggccgcgattccgggtttgattgacccattaaagaagtagaccatcgcactcgctgccgccgtcacccccatcatcaggttagaagttgctgatgacggtttaagcggcatatgcataatcgtatccatggctagcactttgaacgcgccactcccgatccccaacaagccactggcgaaaccagcaccgaacatcatggaaaaaccacccggcacgttttcaacctgataatcaacttgcttattcaatgctttatcataataagtaccatttaagttcaactgtgtcgccagcttgtcatctttgactgacagtaattcaccgttcttactcattaatttacgaatcatattatacgtcgtgaaaactaacagcgccccaaataggaagtacaggaatgttgcattaagcacccccgtcaacactgcaccgaggacggccccgaccgtcgtcgcaatttcaagaaacatcgcgacgcgtaagttcaacatctcatcacgtaaatatgcaatggtagagcccgaactcgtggcaatcacggcgataatactggccccaatcgcatacttaatatctaatcccaaaccaagtgtcaggattggtgtgacgatcatgccaccaccgatacctaaaatagcaccgaaaattccggcaattaccccaacgccgagcattagccctaacgaataaatcatttccttcaccttcaccctttaaatttcaattgttagtgtaccatttaaaccgattgatatctaattattaaatgaaggttagcgtatccccagtacgacagtcattaggcttattttgcgtctgaaaacaccacttcaatttctagctagtgtaatcggtaacaacccgattaaatcagcaatccacccttaaccgcgattaaatttttagatatcaaactgattaaactagtctagcgactgcgcttgctggaattgtgccatcaaaccggcaactaatggggtcgctaaggcttccggggtcgttgctagggccagttgagtctgaaaacgatgatctgccaatgatcgaatcagcacgtcaccaccgtcataggtttcagccaatgaccgtggcaccagggccactcccaattggtgattagcccagtgcatcgccgtgcgggcatcatcacaagtcatgatgtaagtcggcgtaaccgacgcttccagaaaggcaacgtggaataattcattaaaacgacggtacttgatcaatggtaacgtagcgaggtcacttagttgtaactggcgccgcttttcaaaccgtgaatatcgcttcggaatgactgctgccatccgttctgcgggaaagtaacgacagactagatgttgcgcgttgaacggtgttcgtaacaccgccacgtctagcaaccgtttatgcagatcgtctaacaactcatacgtattgccttccgtaatcgcaagctgaacatcgggatgttgccctaaccactttagtaatgccgtattcggcatgacccctgccgaggatgaaactgtccccagattaatggtccccgtcacgccgtgtgccagggcccggaccttgttctccgcagtcgccgacaactgcgtgagctgttgggcataccccaccagtagcttgccagcttcagtaacagtcacaccctgaggcaagcgattgaagagggtgacgcctagttcaagttctaattgcttaatctgatagctcagtggtggctgcgccacgtgcaagcgtttggcggccgctgtcatctgaccttcctctgccacggccaaaaaatattgtaattgttttagattcatccgttaacgccccctgttattaaatattagtatacacgactgacaaagcgggaattttacaatttatttaagacgtgccagaacccttgtgaatgcgttatactagtgataattaatttattaatgaaaggagtggtcacgtgtcgtttcttgaccgacttaaaggaatgcttcaggcactaaacagcacggaagccgccacaagcgctactgaggcaccacgttccattgccgcacaaactgccgcagcacctacagttaaccaaacagaagcattagttctcgttcaccacctagatcaggatggcaatgaactgcaggctgctgatatgattgctggcaccattggcgaagagattcacttgccagccgtcagcatcaccggctaccacctcgtccatatcgaaggcttgactcgctggtttacgaccccacaggctagcatcacgttgacttacgaacgccaagctggccaaccagtctggatgtacgcctatgacattgaccgccgcgaactaattggccggccgaccatgtaccgggggaaattaggaaccccttacgaaatcagtgcgccgaccgtcgccggttttaagctcctccgttccgtaggcgacgtgactggggaatacacgaccacttccaagacggtcctttttttctaccgcaatcaaaattggcagcaaactgacctcagtactggttttgtccaagtcaacaagttgaccgccgtttatccgtatcctggggcaactacgaccaactatttaactaagctccagcccggtagcacttataaaacgtacatgcgcgttcgcttagttactcacgagacctggtatgcgattggcgatgatcagtggattccggagacgcacctccaattaactaccggtgacacactgttactcaagttgccagccggctaccgcgtccaaaataaacggcctgttcgccaaaccggcgttgtcagttttgtccctggcaaacaggtccacacatacatcgaaccatatggccgctatttaaccaccgtcactcatggtgacacggtcaatttgattgagcgaatggccgacgacaacggggtcgtctggtatcgcctgcaagatcaaggttacttgccgggccgttatttaacgaaattagatccaccgtttgcttaaacaagacttttgttcgattaacgcgaaccatgctaaaatgcgccactcgctagcttcaatctaatctagcgagtggcgcattttaatatctacttatcaacaattatgcgcatcaactcgatgccccgattcgtcagcaagaaaccttcctggctgtggtgcatgaagactaacccttcaaactcgcgatcaccagcaaagttcgcctcaccgacctgactagtcgtcaagtgtcccagtttagccgctggaagtgacgtaatactctcatcggagaccaggtagagccgaccagtaatctcgttatatccaatcgattgggcgaagaaacccggattattagctaacccctgcgcgagttgttcaaaatgtacaccagtcgtcgaactgattgtgccacgataaagcgtgacattgccatttctgagctgactcgcatgcgtccaataataggcctgcccagcgcgatcaaaagtcagttcatcacctagacgcccgctaccagtagtaaaggcaattttaagatccggcgtcagggattgcggatttagtcgcgcaacacttgcaagctgatcacgtgccgtcgatgaaataaaccacagctcgttcgtcttaggatttaaagctagtgactgaacgtgtcccgccgtaaactccggccccacttcaatggcggccagcacccgacggtcaaaagccgtcatcttcccgtcgaattggtgagctgctgctactcggaccatcgccatcttccctgattgcccagcccctaaagccatcaggcgttgccaatcatagcgaacgacccagccagtctggtcggcgccacccaactgttgatcattgacgtacatgacgtacaagtaccgattgtcagctgaaaacgtcgcactctgtgggtcattcaacaagcggctccctaactgttgcggtaaatacagtgctgttttgaaatgataatggtcgcgatagccactactctggcgcaacgtgtctggctgattttgtagcccttgagtcgctagatacgcggcggtaggacgaaacaaaatatgctcagcggtgtaccgtcccgccccttttaagggcaaataactcagcttattggccgcgcgcgtcaccccatgttcctgttgatccgttgtcaccacgcgcatcggttgccgcgtgggtgtcttaatatcagtggccctggttccgacaactcgtacggtgtccgccaacgcccagctcagtcgcccagcagtcccgtgacgcacctgccaataagtcactaaccgcttgttttgtgtcaccatcacctgaccaacccgttgccagtgactagtcgtccgggccgtcccacgtggcgttaattgcatcgttgcacgatttaattgatataagcgcgtttgtttcgattcaagttcacaattccggggcgctaagctttgcaccgctggccaccgtaccaagttcgtcgccgcgtgcaccgtcatcgggccccacaaccccattcctaacatcaatcccagcatccagcgtccccttattttcaatctcatcgccccctacaatctaaattgcagattgattgtatcgtaattctctcaccttagcagtgctacaacgttggttcacatggtgaatttacatggaccgataagcatgttagaagaacctctcatatcacttctatccggtcccgccacacaaaaaatgatgagaccgccaaatcaacttggcagccccatcattttatgaactattcacatatttgtttgtgcttttgcttgagacacattgtaacttttctatccgttaaatcaagagcagccagcttaggcccgctgggaaaagttcgagttagcgaccaattgcaccaagttaagtggccgttcatcagccattcgagcgggttcccgaaacgtgctcggtgccactgaagcctgtgcttgctacgccaacggactaatgccaaaaccgcattaatccgttggctaggcaatgctcagtaaccaaattattcttagctggaagtgattttcttccggcttagaataagactcgtatttgagctgacgcgggttgtgcgttagctcaaatcgatgtcggcttacgttccagcaattgtcacccagccccggaggtcgaaataggacgcacatcggctgacgaacagtaatctaactagattggtcagctaagtgtaaaccacaatataaatcctagagcttcgaggtcagcttgacatccggatacttatccgcaaaccagcgttcggcaaaggcattttcgaataagaagagcggtgccccgtagcggtccttgaccaatagattccgcgaactggacatcttttcatccaattgttcgggatcgatccaacgggcagtcttgctacccattggttccatgacaacttccgaattatattcattttgcatccggaatttgaagacttcaaattgaagttgaccgactgcaccaagaatatagtcacccgttgaatatgaagtgtacaactgaacggccccttcttgaaccagttgttcaatacctttatggaaagacttttgtttcatgacgttctgggctgtaacgcgcatgaagagctccggcgtaaattgcggtaacttttcgaattgaaccgcatttttgccagcgtaaatcgtatctccaatttggaagttacctgtgtcgtagagaccgacgatatcgccagcaacggcagtttccaccgtttcacgggtatcggccatgaattgcgtagagttgtttaagcgcatcttcttaccagtccgctgcaagaccacgtccatcccccggtcaaattcgccagaacaaatgcggacaaaggcgatccgatcacgatggttcgggttcatgttggcttggatcttgaacacaaaaccggcaaattcatcgtcggttggctgaacgacttggtcatcacgagtcttatgagcagcgggtttaggcgcatactgcagatacgtcttcaagaacgtttcgaccccgaaattggtgagggcggacccaaaaaatactggcgtcatgtctcccgccattactttagcttcgtcaaaatcattaccagcttcgttgatcaattcgacttcatccaacgtgtcacgataaatactgtccttggtcaattcattactaggatcaagctcaccgttctcgtctagtggtaagaacgtttcgccatgagcttcattatgataaagttccacacggtgattgtaacgatcgtataagccctttaagcccttacccatacccattggccagttcattggataagtttcgattccgaggacttcttcgacttcgttcaacaagtccaatggttcgcgaccatcacggtccaacttgttcatgaacgtaaagatcggaatgccccgcatcttacaaatttggaataacttcttcgtttgtggttcgatccccttagccgagtcaatgaccatgacagcggaatcgaccgccatcaaagtccgataagtgtcttccgagaaatcctcatgtccgggcgtgtccaagatgttgatccgtttgccatcgtaatcgaattgcatcacggaactcgttactgagattccccgcttcttttcaatttccatccagtcagacttggcaaagttcccacttttacgggctttaaccgttccggcctgacgaacaacgccaccaaacaataacatttgttccgtaatggtggttttcccggcatccgggtgagaaataatcgcaaaggtacgccgggtattgaccgcggcggttaattctgtcttattcattaaaaattcctttcatcataacctgtatattcaacgtgcacggtggtaccgtcccaccgtaaaaaaacatagccttacatattttactgatatttgaccaaaaaatccagtaccaccgaccatcttgcaccgattcggtgggaattcacttaacaaagtcatgacagaccagttgcaatcgttttcaaggccatgcttttaaattaaggccgcgttttatttggcatgttaaattaagttgtgtacaatgtatttgtttttaaataactgtgatttgggaacgaggaggattttaatatgtcagaaaaatttgacgttgtatatctaggtagcggtcacggaacgtttgacggggccattccgttagcggctcgtggcaaaaaagtagccgtcattgaagctgatttgattggtggtacctgtcctaatcggggttgcaacgctaaaatcaccttagaccagccggtagcattaaaaaatcaagttgctaacttccaaggatacggtctgcgtggtgaaccgacgattgattggcaagccaactttgaccacgaacgcgacgtcatcgccggcttaccagatatgattgctggcttaatgactagtgccggcgtgaccctcatcaatggccgcgggacgttcgtcgacgaccatacgattcaggtggcggacaagacgtataccgccgataagattgtcatcgcaacaggtcagcatccacatcgtttggacattcccggcactgaactcgcccatgacagtaacgactttttgaatctaaccactttgccacaccacatcaccgtgattggtgccggctacatcggactcgaattcgccaacatggcactaacagccggcagtcaggtcaccctactcatgcgtggtgaccaagcacttcgtcaattccaccaaccattcgttgaacgattattggccattctcgtgaaacaaggtttagtcctaaaacgtgaatgggtgccaactgcgatcaagtcgactggtgaccacttcgaagtcctcagtgcggatgacaagattacaacggactggatcttggatgcgacgggccgccagcccaacaccgcaaacttaggacttgaaaaaatcggtgtggactacacagcagctggaatcaccgtcgacgaccacttgcaaacgagtgtcgctggcatctacgcatccggtgacgttctcgccaaggatcaaccaaaattaacacccactgctatctttgagtcgcaatacctgacccacctattcacgggtgacaccaatgcccccatcaagtatccggccattccatcggtcgtcttcacgtccccacgattggcccaagttggtacacttccaaccagtgacactcatgatgtcaaagttaccgtcaatgatttaaaggatgactggttccggcagacaacgcgcgatgtcaccggccataacttactcgtgacggatgaccagcaccggttgattggtgccgctgaactcggtgaacaggccgaaaataccattaacacgttgctaccagcgatccaatatcaattgacaccggcgcaacgtgaacaactcgtgaccctcttcccaagtatcggcgcagccgtttggtcagcaatttaacaaattttttcttggcaatcaggcctgtaaaaccgggcttggttgcctttattttcagtctaatgaaaataatttacaaatatatggttgatttatgtaaatagttttattacaatgtaagcgaatacaaaaagtacttaatatttttcatataaaagaggggtttcatcatgaaattaggattgattggcttaggtaaaatgggaatgaacttagcgttgaacatgcaggataacgggcacacgccagtgggaatggatcttaaccccactaatcttagtaccgccagtgctcacgggttggcgacggccacggatctcaccaatttgcttgaccagttgccaacaccacggatcgtgtggatcatggtacccgctggtaaggcaaccaacagcgttatcgaacagttagcccagactttaagtgcaggtgacatcgtcctcgatggcggtaattcgcactatcaagatagtatccgccacggcgaattactggcaagtcaccacatcaacttcttagatgtcgggacgtcgggcggtcaagctggtgcacgccacgatggcaactttatgattggtggcgaccccgccactttccaagtcgtcgaaccactatttaaagcgattgccgctcccaatggatatttgtacaccggccctgttggcagtggtcattacctgaagatggtccacaacggaattgagtatggtatgatggcagcaataggtgaaggctttgacgttttacagcatagtcagttcacttacgacaacgcggccgtcgccaaaatgtggaataacggctcagtcattcgaagctggttaatgggcttagctcaagatgcattcagcaaggatggtaatctagatgacatcaagggtgttatgcattcatccggtgaaggtcgctggaccttagacgcggccctagaccaacaagtcgccaccccggtcattgcgatggccttgatgatgcgctaccgttcagaaaccgatgacacattcactggtaaagttgttgccgccctacgtaacgagtttggtggccacgctgtcgatcacgaataggaggaacgaagcaccatgacttaccttattggaactgatttaggaaccacaagtaccaaatccgtcttgtacgaccaccagggtcacgtaattgcgagtgccaacgttggctacccactctatcatgataccgtgaccacggccgaagaggacccgcaagaaatctggcaggcagtccaagcgaccatccatcaagtaagtgctggcattgatcccgaagacatcgaaggaatcgccttttcatccgcaatgcacagcttgatcctacttgacagtcagaaacaaccgctgacccgggtcatcacttgggcagataaccgggccgcacaagacgccgctgaattgaaaagtcaacccctgggcgatcgcctatatcaccttacgggaacgccgattcacccgatgagtcccctggttaagcttcactggcttgcccatcattcaccggaattactagcacaaacctgtcacgtagtcggaattaaagaatacttgatttacaaaatgacgggccaacttcaaatggattattcaatggccaacgccactggcctattcaatctttataacttcgattgggaacctgtcgcgctcgactatgcacacatcacccgcacgcagctaccaccattggtcgataccgacgccgtgatcgatggactgacaccagtcgcagcatcaaccctgggactcgcacccacaacgaaaattatcatgggtgcaagtgacggtgccctttcaaacttgggggtgggggctgatgaaccaggagttgcggccattacgattggcacttccggtgctgtacgggtgatgacgaaacaaccatacttggatcctgaaggtcgactattttgttactacgtcgcgccgcaccactggattgttggtgggccgatcaataacggtggtcaagtcttccggtgggtccgcgatgagctcttcactactgaaagccaaaccgcccgtgcgaatcaacaagatccatacgaccaattgacagcgcttgccgcaaccgttcccgtcggtgcccacggactcttatttcacccctacttaagtggtgaacgcgcgcctctctggaatgcggatgcccgcggttcactgctgggcgtcaccacgaccacgaccaaagccgatattgcacgtgcggtcttagagggtatcgtgatgaacctgaatactgtcctacaattgacggcagccgccgaaccagttcatgcgattcgggccactggtggctttgcccgttcaagtttatggcggcaaattttgactgacgtattgggacaacccattacgattccagcgagcttcgaaagttcctgtctagcagcggccgtgattggactcaaggcactggggcatattgatgatttaaccgcgattcacgccatgattggtgcaaccgaaacttatcaacccaacgccgccaaccaccagttatatcatcaacaccaagtcgtttttgaccacgtaacggcgcaattggcaccgttgtatcacgaaattgctactctaaatcgttaggagtgtccactatgccatttgttgttcttacactcggcatcctactactattactattaattattaaattcaagctgaatacttatattgcactgattgttacggccgtcgtcgtcggaatcggactagggatgccattaactaagattgctactagtattcagaacgggattggcagtcaactgggtgagttagcactagtcttcggcttcggtgccatgctcggccgcttagtagccgatgctggtggtgcttacacgatttccacgacactattggatattttcgggcgcaaacggctacaaattgccatcgtagtcgcctcatttatcatcgggattgccctcttcttcgaagttgggatcgtcttgttgattccaatcgtctttgccattgcgatcgaagcacaagttcccgttctctatctggggattcccatgggcgccgcattatctgttactcacggattcttaccaccgcacccggcaccaactgcaattgcgacgacgctaaatgcgaacgtgggtcatgtgctactattcgggatcattattgcgattccaactgtttatatcgcaggaccgctcttttcacgctgggcgcaaaagatggttcctgacgcattcaccggtaaaccacacctgccacttagcagtaacaaacgtcaattcaaagtatctgaagcacccgggtttggactcagtgtcttaacggcgctcttccccgtgattctgatgacaatcaccaccgtctacgaattagtcgttgatcacggtgtgacacctaaaaacccgtcgacccttgaccaaatcattcgtttgattggggcacccggaattgccatgttaatttcactattattcgccctctggtcaatggggattcaccaacacaagaccaataaggccatcacggccaccatcgaagatgccactaagtcaattgccatgttattactaatcatcggtggggtggcgccttcaaacagatcttaattgatgggggtgttggtaaggccgtggcccagttgttcagtggcagcagcatctcaccactgattcttggctggctagtcgctgtcatcttacgggtctcactcggctccgctaccgtagcggccctcacggcagccggcctagttgcgccgttaatgacgcaagctggtatcgaccccgccctgatggtaattgccatcggctctgggagtgtcgccgcttctcacgtgaacgacgctggtttctggatgttccgggaatacttcgacctgaccgtcaagcaaacgctgcttacatggacgatgttagaaacgatcatcgctgtctgcggtctcggaggcgtgttggcgctcaacgccatcttccattaagccctttgaactggctgaatgctaactataatccgcatcgaaccagtccatggtcatttaggcgtgacttactaataactgttaattaaaacaccgctgttacgcagcttgaagttgcgggtaacggcggtgttttgtgactgataaatcatctagcttagtggttaatccttggattgcatccctaaatcgtgcttgatacgcgtcgatgagatgccttcagtacggggcaaatagaccacctcgcagtagtcttttagaaaatcaaacttgccgtgccaatcgtcacccatcacgaaaatatcaatatcgttatcaacgacatcccggattttttgatcccagcttttctcaggtaacacttcatcgacatagcgaatggcttgcaaaatatacttacgatcctcatacgaggtgtacgcatgcttacccttctcagcattgaattcgtcggtcgagacgcaaacggtcaaatgatcgcccaaggcccgtgcacgcttaagcaaccgaatatggcctttatgcaacaaatcgaatgtcccatacgtaattactttcttcaaaaaatcactccttatgccacgttcaagcttaattcaccaattatagcacagactacttttttgatttagtggtcgtcgtcaagtctgctttagtcgccttagcaggttgcggctgatagaccgtcgtttgcttacgcaagtgctcctcatttcgtaactcgacaatattatagaggtaaataaccacggtccggaccacagcatagaacggaatcgctaaaatcatgccaagaattccggcaatatttcccgctgctagtaataaaataatgatcgttaacgggtggattttgagtgtccgcccaataatgttgggatagattaagttcccatcaacctgttgaacaatcacgactacgataatcacgtacactacctgcatcggtgacttggtgaaggccacgatgagtgatggcgcgatcccaatgtaaggtcctacgtacggaataatgtttgtcaatccagcaatcacgccaagcaataacccgtatggttgcgagatcaacatgtagccaatcgccgtaaacgtccccacgaagaaacactcaataacctgaccactgatataactagaaatcgtgtcgcccatcttttgtagtaaaccaatgacttcaggccgctgtttcttcggtaagaaccgactgatagctggaatgaatttctcactatccttcaacatatagaacaatacgactggaatcgtaattgccatgatcgtcacactcgtaatcgtggaaatcaccgtaacaacactacttgataatgatgacaaaaagttctgagaatacttactgatttcaccattgaattgcttggtgtacgagctaatatcaattcttttcagtaccgaactattattgatcagcttagtagcggctttttgcatctcagtggcaatacttggtaggttataaatcagttgtgtcacctgactgactaaccgtggcaacagggaaaccgctccccacaccagtaacccgaataatagcacaaatacgatagccacagctccggttcgagaaatccgaaacttcttgtaatgaaccttagtcaacaacttgaccaagggattcaacatataaaataaaaatcctgaaatcaaaattggcatgaacacgacacttaaaaacgtgccgattggctgaaacaaaaaaccaatgttcgtgcagacccagatcaaggtcgccacaatcaaaatttcaagtgaccaaaataacaaggccgaatcttttaggcgcttaaacactcgcgctcctccctttcttggtgcaactattaatgcgttaattataccctatttcacttagtccgaatacgatttcgatatttctcacaaaatctatttaaaatcaatgagaataatggtaatttaattaatgaacgataaactttcaaaggagcgctacattatgtcacgtaaaattgccattatcggaatgggacacgtcggttcaaccgccgctcactacatcgtcgccaatggctttgccgatgaccttgtcctcatcgatacgaacaccagcaaagttgaagcagacgcgcttgattttcaggatgcaatgcctaatttaccttatcacacgaatatcattatcaatgattatagcagcctcattgatgccgatgtcattatctcagctatcgggaatattaagttacaagattcaccaactaatgaccgcttcctagaattaccctttaccagcacacaagtcaaagacgtcgctgctaaaatcaaagccagtggtttcaacggaattctagtcgtcattactaatcccgtggacgtcatcacatcgatctaccaagcggttaccgggttgccaaagaatcacgtgattgggacaggaacactactggactctgcacgaatgaaacgagcggtcgccagtgcactacacctggattcacggtccgtggccggctacaacctgggtgaacacggcaattctcaatttacagcttggtcaacggtacgcgtgttaggtcaaccaattaccaaattagccgctgaccgcggtttagatttgaccaaactagacgccgaatcacgcgacggtggcttccgggtcttccatggcaaaaaatatacgagttatggcgtgacaacggccgcggtgcgcttagccaacacggtcttgaatgacgccctcaccgaactccccgtttcaaatttccgggaagaatacggcgtatacctttcatatccagccgtcgttggtcgtgacgggatcgtcgaacaagttcaattggatctcacagacgaagaattgaaaaaattacaagtttcagctgattatatcaaaaccaagtacgctgaaagtcagaccgactaatcagcactcaaatgtcaacgaactaacactttcaaaaaggcaccaccgacatgattatgtcggtggtgcctttagcttattggactaagcgaaccttgactggcacgattagttctttgttattatttaactgaattccatgtcatgatgattcgttttggctaattggctgacaatctgcaaccagtctttcatactaaccattaccgctgaatcttgggtgctgggattttccacctcaatggtatcgtggccttgattaacaatcgttaacaactggttgatattcttttttgctaatgcggtagtaacttttttcatacgcccatctcccaatccgttccataattgttgccattgtgcaccatccattcaagcccgtcaagcgctgctagcaattattcaagtaactgagcaatattttacactaagcaggtcccagttgcacctaaaagaaccgagttttacttaaaattaaagtcgcggggtcttgaacatcgacttcaagacgtttctgataattttcatctgttcattagtaatcggctgaccgtcgtattcaaattggtttttcttgttttcaatcacttttttaagatcaacagcagcggcattgatcgccttagctgtcggttctttatccttaccaaccaatttggtataactcgtaccgagcacttgagcaacttccttaagcgtaccgactgacggcgtgtgctttttccaactatagatagcactcgcacttaagcctgctaaggtcgccacttccgctaaggtcagtccattcttcttggcaaattgccgaatattcttaagtaattcaccgttatcaatcttcaaaaaagccaagttcgtcactcctatcggtcaagatctaatcaattattgttaatccactcaagctgttgacattacttaatcgaaccgcaactcatttgcaacaactttgttacaatgagcgcttatgatggggtcagcgttattgaatgagatggacatggggattttcggggaggaaatacatatgaaacaacgtcttatcacactgattgttgctattttaggcctcacggtggagctttggcaagcaccaaacgtcgatgccagctcaacgaatcgcgtcattaaaaccactaatcttactaaaagcgcctacctgacgaagaatactcagggcggcttctataacatgagtggtgccgcaaataatcttaaaatccagagtcggggaacgcttcgacaatatggtaataccacttggtttgtcacccaacaatggcaaattcgcttagctaataataccacggctaattattattttgtaacgagtgctaatacccgtgttcgtggctgggtcaagaccggctccctcaagaagagcaccagatctttcaccaacctctataacgtggccaaatccaaacttgaccatcgctatgtctatggtgcggtcggtccgaacacgttcgactgttccggttacactaagtatgtcttccagcaagctgcgcagaaaaccttaccacgcgtggcacaagctcagtaccgacaatatcccaaaatttccaaacagcgcgcccaaaaaggcgatttagtcttctttggtagtggcacaggttcgatatcacacgtcggtatttatgttggtggtggaaagatgattgacgctcaggacaatggtgtcaaaaatgaaaaaatctacgttccgtggtggcacgcggttggctattcacgaccagtcaactttggcgcttaaaagtgtaattcctattttcacccgacccacagaggcgacttgtgggtcgttttttattgtcctaattatcatgacttgtgtcaaccatgacggctggtaatcacctcttattattcaatgtcgagacgcaaccagaacacaaaagggagcaccccagcacggagttcactccctttgtactttaattacgccgctgacagaccgtcagcagagctattgccgacgtgataattcttgatagcgactataccagatatcaatgtagtcttgtgaaaacgggccttttttgtttttgatccaatcaactaagactttcacatttgcttttaaaatgcgatcagtatcagccgaataacgccattgggcaccgtgttcttcgtactcatcaacatccaacaaccgccgctcaccatcgggaaagactttgacatccaaatcatagtcgatgtacttcaaagcctctttatctaacacgtatggtgatgctaagttgcaatagtatgaaacgccgttatcgcgaatcatcgccacgatattaaaccaataatgcttatgaaaataaacgattgcaggttcccgcgtcacccaccggcgaccatcatcctcggtgactagtgtgtgatcgttacaaccaattagtacgttctcgcttgttttgagtaccattgtatcgcgccaagttcgatgtaaacttccgtcgtgcttatagcttttaatcgtaatgaagtcgccttccttaggtcccttagcctcgcgcgccatattaacccaactttctaaaatgagggtaaattttcatcgaatttcattaaacattataccagatttttatggcgtgcgggcaggtaattcaaccttttcattcatcagcaacttgttcgtcgataaatcgattgatatcgtccatcatgaagcccttttgaaacaggctgcgtttcgtgcgcatcatgcgttcacgaaacgcatacttgcgattgcgttgccacaacttctggccctgcgtcacaagggcggcccactgttcatcttcatccggttgcaattccaaactagcaatcgccgccgtgatcgtatcattgtcaaaccccttcgtcatcatcccttgacgaactttttgttgcattgtcttgaaggcttgccggtgataacgtttagccaacttgcgcgctagttcaccggcgttatcaacttgttcttcaggactaaactgcccggccagcgcgtcatcaatcagctgctcgcccacacccttttgtcgtaatttctgccgaatcacccgtggccccttgtcactggtccgtttggccgtccgcacaaaggcatcggcatactgttgatcattcaataaccgtaactcgcgtaattgttgcatcgtcgcgtcaatcaccgtttcgtcgatctcttcatcccgcagcttgtcatggacttccttctccgtccgcagttgatgtgataaataatctaatgcgcgcgtataagccttggatacatcgtcagccgcaatcattgtcgcttgtagttgttcatcaacttccatgcccttgaaaacacggaacttgatcatcactgactcactgattggaaaagcatactgctcgtctaagtatatgttgtagcgccccgcacgtttctgggctacgattttcgtcactttcttcgtcacggacatccccctcctctcatttaatcatcacgattatagtttaccgaaaaactgccgggtcaaccaactaatttccccaggcagtgctaaaattccataatgttttaagacctgatcggtgtatgactgcatcatcgcttgatccgcatccaatacggtcggtgatgactgatttgggactgcgcggcggcgatggtgttcctggactgctagttgcagttgccccgccttagccaattgacgagtaacgatccgcttgctcgcatcgacgcgaaccgtgatgggaccgtcataaatcaaagcagtcataaagccttgatcttcgatatgcgccaaataatgtcgattataccaactagtcgttccccgtttggccgttcctagcggcatcaagatggcagcaccatgaatcaccggtagtttatgcatcgatagtcctaactgactagccagccgtttaattagttgggtcccagaaaagcctagttggactgcataagtcatcatgatttgtcgcgttgtcagcttagtcttaatcagtcctcgttgacggtcaaaaatcaaggtattctcggcgcatgccaagtgtttaatgtcaagcagaaaaattgtctccagcacgtcgattatatcaatatctgaacgcgtcgctattggtaataatcgctgtggctgtcgggtgtcccaagtaccagattcgagatgccaaaaagagttaacgtgatgcggatcgtcaatattttgggtcataggtggtaaagccccctagagataagtattttctctaacattcaccggctgaacgcccccgcccgttcgcggttaattagattaatcacatcataacaattacatacaatctaggaaagcacttggtcattgaattgctcaaatctaaccggaacattaataatgaaaacaaatcgtcacttttcagtccgttttcaccacctgcaccattactgaccactcactacactagaatcaaccttggccaaggtaattaacgataaaatgaggttatttcaatgcacgctgaccgttttgataatcaagccgcctttgacctactcgcacatccggaacaccaacgcctgttgtatggtgctttgaaggccgcacacgtgaccaaatatcacccgcaatttgaggattgcgttacctgacctggctagccgcctatcagaactatgagcctgaactgcctgccaacttggcagactttcgcaaatttgcttttcggcgcatcaagtggcgaaccgttgactatttgcgtaaccaaactttgcggacacaatcgcaggtcaagctggaacacgccctgcccatcgccattgacccgatggctgatcaagagatccattggcaattagccgcattattaacggaactcttagcacaatgtcgtccgggtgaacgcatttaccttactgaattttttctggaagaacagtcggttgcaagcatcatgcaccgtcatcaagtcagtcgtcggaccgtctataactggcgaacccgcttgctcactaaagctcaccaactctatcagcaacaagcccgtaactaatactaaaaccgacatttgctcaatacgaaaggagccccatatgcataattggatgaacactcacctcattattacaacaactgacatcaaacaacatcaggtgcatcaacactggtccgctggtcgggagctaacggacgctgatcttgccactctaatggccgtcctcaggccactatttgctgacacgattatcagtattactgtccaaactgtcaccgagtttgccgactaaacactcaccagtcaaaaaagtttaatcaaacggtgcacaaatcgactggctcagccgtctgtattaatgtaagctggccagcctaccaccacaaaattcgaggaggaactcatcatgactaaaacttggttaaaagctaccctgacggttcaaacgacaacggaattggacgaacaacgtaaacaaacgtttaacggcatcgcccaagacgcgactgacgaacaactcgctgcttttggtaagatcgtcgaagtcttgacgggcgatcaattcatggccgctaacttggtcaacgcttaccgctacgatccacaacccgtcgcttaacacactcataatataggaggaaacgcccatgaaaactttagacttaagctttaaaactagtactaacaaggttcaccacttgaagttacactacgccaacgataacttgagtaaggatgtcgttagcaaagccatggcggatctagcagccacgaagctgttcgttaaggacggcgagaacctcgttgccgaaccactcgccgccaagtacgtcgaaaccatcgaaacaccaattatcaccgcaccaaaggcttaatccgcgttacctgctattacaagaatccccggtcaattgctgaccggggattctttattatattcagttagcttatggcaccacgttcggcactagatatcacaagaaagccggattgccctagtctcattgcgatcaactggataaatctcgataataatgctattaccgaccggatgccaatcaatcgctttgacgagtgctcgcataaatgtccgcgtaatttgggttttgattgaaatgccgctacgctcaatatcatcatagaaaatgacccgctgatctaacttatcgaccttaaagtagtagtacgcaaagtgggccgtcccccgtttcaaaattaagtggtacgaattattataatccgcggggaaaaccgtgatccaatcgtcattcatgtcggacatccttttcacttgaatttgagctcttgtctaattgtaccgtgaacggcggggaaaacctagggagaatgtgagaaacttgaactactgagcctagcatcattctgttcattaactaattttaccacgcgttttatttagtcattattatcgcgtttcaggctactaataattgcatcttgataaaatgctggtaaattatagttagccaaattgtagctagtcaaattagttaaaactaaccatccgacaattatgacttaaatactagtttactctaacacaatgtttgctataataaacttaaacgataccgcaaagttaatcatatcaagtatgtttacttgataactattttgtactataatcattaggttgtatcaatacagtacatacatagtcagtttgcggtaacccgaacactagtaatagattaatctgactgtgatttacgggggaaaatatttaaaggaagcatagggtgttacttatggaattgaaggaacgagaaatcagaccgattacgattgacgccgggcgtcagcatcgtcgttatggttatcggttcattaaacgcgtgtttgactttgttgctagcctcttaggcctcatcatcttatcaccactcttcaactttaattgcaattgcgattaaagttgaagatcctaaaggcgccgtcttctactcgcagacacggttaggtcgtggcgaagtcccattcaagatgtataaatttcgctcgatggtttccaacgccgatgaattgttggaaaaattacttaaagataacgagattgatggtgccatgttcaaaatgcaggatgatccccgcgtaactaagattgggcgattcatccgtaaatatagcattgatgaactaccacaattgctaaacgtccttcaaggctcgatgagcttagttggaccccggccgccattgccacgagaagtcgaagaatattccgactatgacaaacaacggttagccgtcaagccaggttgtaccggtttatggcaagcaaccgttcgtaacagtgtcggttttgatgaaatggtcaagttagacttaacttacatttctaaacggagtgtcgcatttgatgtctacattctgttcaagaccgtggtcattatgttcaagcctaatggcgcttattaaacatcaaaacaaaatgcgcaaccaaactcaaggggaaatttggttgcgcgtttttgtaacccattgatttgaacacaccacgcaccattcgctcgccataccatcaaagttatctccccgctcctgcaatcatcattgattcctcgaccctaccggccaaatttttcagtccctaatcatagtgtgcacgaacacaactcactgggattctccaaatattaagctattctcccaatttaattatcgttgatataactatgtcgctcctcagttaattaacaataaaaatactttctaatttataaaataataagtttgttaataaccaaccctagccagttaaaaccactatcaaccggctaattggctgtgatacaatgaattgaatgttgagaaattcaacgttagactgcttaactgccacaaggagccactcatgcgaatcataaggaattacttttatacagcggggtataacctcttaattttactaacgcccctcctaaccgtcccgtatatctcacgggtcttagggccgaccggcgtcggtatcaatgcaacgaccaattcgatcattacttactttctattgttcggaacggtcggtattacaatttatggtaatcgcgaaattgcctttattcgcgataatcgggggcaacgctcacaaactttttgggaaattgaaatattacagttattgaccatcagttgtgcttatctcgcctttttagtttttcttttttttgagcaccaattgcaaatttattttttctatcaatcattttatattattgcgggtgctgttgatatttcctggtactttatgggtctcgaagatttcaagaaaaccgtactccgtaacatgctcgtcaagattgcttctgtaattgcgattttcgtattcgtgaagactcggcaagacaccggaatctacattttgattttagcgggctcacaagttttgggcaatctgacactgtggccatacttacgacatagtgtcgaacggcccaactggcgtcaattgaatctctttcggcatctgcggccctcattagcgttattcgtgccacaaatcgccacgacggtttaccttgccttgaataagaccatgttatggcaaatggattcgctaaccgccgccggattttatgattactccgacaagttgatcaagctcgttttagcgctcgtgacagcgactggaacagtcatgttgccccacattgccaacctcttcatgaagcagcaacttgaacgcgttaaacaatacttatacatgtcctttgactttgtgctcgcgattgcgattccgatggccctcggcgtggcagcggtcgcaacgacgctcgcacccctattttttggacgggcatttggggcagtcgaccgactgttgatgattgaggcacccgtcatcatcctaattgggatgagcaacgtgcttggtcagcagtttctgctaccgactaagcagactaagacctatacgatttccgtcactatcggggccctcgtcaacatcgcttgcaacatcccacttatttggttctggggcgtggccggtgccatgtgcgccacgctcatttccgaagtgtgtgtcactggttaccagttagtcgtgactcgacatacgttagcgaccagacaattatttacggctagtctgaagtacgtgctcgccggtgtgatcatgttcgtcgtcatttacgccttgaatatcaatatgaccgcttcttacctcaatctggccttacagattggcatcggtgccctgatctacatcggactattgttcctgcttcagccgccagtactgactaatgctgcgaaattgcgaacccggatgtaataaccctacgtttgattactaattcatacaacagacttaaaatgcgccactcactagtccgatcatcgtctagtgagtggcgcatttttaaactattaagttgttatctcattaatttgcatgccgcatcattcatcagcgactgactcccacttaccacttcaatattctaattaatcgcaggcgccctaaaaatgagtccgtttagcagcttgtgggaagaacttacgtttcaacagattatacgctttcgccggtaactgttgcttttccatgtacattaccgggacttccacgtacttaagttggttgtggttgatccacacgtccaataggaactcagataagtacccgaaaacgcgagcttcttggacatcgtaatccgcaatatcgatccggtcacgcacagcaaacagaatatcaaagacccatttggcatagtcgtcaaacttaggacccgccataatcatcatgttaaacatatgcgccgacgtttgatgcatcaactgatcaaaatcatctaaataggcggcatgacgttcactaataaccgttcgcatcatgtccagtggttcccgatgatgtgcgtgaacgtaatgtgaataattcgattcaatataataatggcgcttttttggtacgatgacatcatattgctgcaataaactttcaatttcggtcattgataaaataccggctaatttacgtttgggtgcctcagacaagtagcgtcgatattgattcaagcccttaacatccgcatggcagttcttccagatccagtacatcgccgttagctcgttaaagttcgggttgcttgccgaaatgttgtcaccgacgtcatcaggttgataattttgtggtgcacccccatggatcgcagcaccaacaaaaataggtcggtaagttggatcctgtggcatttgatacggcttatgagccgctacataaatttgtactttcatttgccagtcccccctctggtatgaaatttgtgcttcaagtcatgataaattttccatcatttaataatgcaagtatttgcacgtgactgttaggtcaattaattatctcggcatttgccggattatacacagtaatttaacgacgttgtagccggcgaaatagatactgccgaggtaaaaaacaagctcgaattcccggaagatgcggaattgccagcatggcaaccgtcacgaagccaattcggtaactgattgcgatgatcgtcgtcacgagtggtcccatatgggtaatcaaatgattcgtcaaccatccttcaatgccaatcacgtttagatcgatcaaatgaaaacacagaaccactagcgataactgaccgtagcgttttaaccacttaatcggccgcgcattcggataatgactaagccagtcactgacgcgaatgatacacaaactgccagcaacgccccccatgacgctaatcaacagattaggcgatgttggaactgtcaacgcaaaataaccctggaaagcactcactaaccacatgaacgtgaataataaataccaagctgatgatatccgacttagcagggctgtttgtttaacgaggtagccagcatataaaaagagctgtgctaacaacgcggcgttaacggcccacggtaaataagcgacttgaccgagccaaccacctaagattgcgaaaatagcgaacaccccgccccgtacaatggcctgacgccagcgctgatgacgtcgggccgttagtagcatcacaccattgaacagttgcagcgcaataaacatactgagcaagaaccacacggccccaatcggttgaacttgccagtgccacggattgaacactgccgaaccggccccgtatgccgtggcaattagtccttgtcgccagcttggaaaatacgcattaaggagcggattcggtaataatcgggctatcgcacttacgactaagagcacaactgccgttgcgagatacggtagtaataggttaatgatgccacgctgacattcttgtcgtgccgggcgtgagtgatacaaataaccgctcaacatgaagaaaatcggcatgtgaaaggcgaagatcaaactaccgaagaattgcccgttataggggcccaaggtatgaccaaccacgaccgctaaaattgcgattccctttgcaatatcgatccactcaattcttttgcgcattaactgagcctcctattaactgggagccaccaaataaatctggtaatatccgttgcaaccagcggacatgtcgtaataaccatactagttcaacactaacgatcagcaccgcaatactccagagccaaccagaccaccacgcgccaataattggtgtcagcaaccgattaatgaccataaatggtgtaatcagtagaccggccaccagcatatcaccataacccgtttgaacaaagttatgccggcgtactgctttggaccgtggccggttcatcatccaggtggcaatcgtcacccacagcgtcaaacatggaattgcctgaaaggtttgggcaaatggctggctgctgataaggtcaaaattcttttccagattcacttgatacatcgtgaccgacaccatcacggcatagcacccacatgtcagcagccacgccactaagaggtgttctcgcgtaatccggtgtaacacctccgtttggctcaaccaataccccatcaatgcaaaaaagcaaccggccgtaatcgcgagcggcggattaacactgatcgtcgtcaagccagtgaaataggccaagattggtaccatgccaataaatacgagctccgcccaaaataggtattgctgaatcgcaacactcgcatggtgtgcaatcacccttaacaacggcaaggtgacaaagaagcccaatagttcatataaaatatcataaaagcccaccggcgcttgggctaacgcggtaaaaaagccagcgatgttaaaactagttaaactgccttgcgtcaccaagtcttcaagatagaaggccagtgagaataaggtaattccacccattatccataagactcggcgaatcaactgcgatactggtaacgccgcgcgtcgcaattgataggcacccagggccattaataataagttgggacctgctgccgtcatcaatgcaatgacgagctgcggatagaaccagatactttgtggttggtggctaaaactaaataccgcgttcatcccggtatcaccgaatagaattaacatcagggcgatgatcaggatcaaccgctggacccgataagcctgttgatgattcatcggcacgacgccccccttcgaataacgacaggttggtcaaatgcggggccgactgccgtttgataatttggtaaatcagcgaataacatcagaataaagacgttatacgttacttctaagaagtgctgatcaaacatactactgatggcaatggccacaaagattaccggcaacaaataatcgtgttgccgcgtacgttgatacaaaaaccaggtcataccgataattataatcagcgttaatagtaatccgtatgaaatcaacatatttaagaatgacgagtcaatgaagaaatacgttgcatcaccaacaccattggtaaacgtttcaaaccgatcgccgccccaaccattaattggaatcggggcttggccgaataatttaacgccatatgctaataacgcgttatttcctagcgcgagtcgcgtggacaaggtattattgagcgctaccagcaaccggtcttgataattaaaaatattcgacaacccaataattagcccactagcaagtggtaacatcaaaaagctataccgaatcatcggccgaagccaccgaagctgacggcgatagatatagaccaagtacaagctgatcaaaacgagtaaagcaatcacatccgtcatcgttttcgtaaactggtaaatcattgccaagccaaacaacacaggtaatagcgctactaatcgaaaacgacgggccaataaatacaaatacgccgcacacagatggaaaatatgggccgcaaaatcagtggtatacacgacaccaaacgactgacgtaacccatcggcagttgcaaacgtaatatttttaatcagtccgacttccgcagcaactagcgctaacaagagaatcgtccccacgacgcccaaataaacttgaatgatctgccgaaacgaaacttcccgggctgcaatcaccaacatgattgtcggcatcaaataatgcgcacccgatgtgagcgtcacgacagtcaccagtacaagtaaactgacttctccaataatttggccgggggtcaaggtatctaagcaaaccacgaggcccagtaatgcggccaaagtcgctaattcaatcaaaacgcccactcgatgcggtatcatctcgttaaaggtcgtcgtctgtagtgtgactgaggctaagtagattccaaagataatcagatagagcgcattacggtgctgctgtatacttgctcccctacgtctcatcatcgtgccgcccccaaccctgaccatatttcacgaggtacggactcagcaacgctaagccgcccccaacaactaatattaacttccaaagcgccccgcggatcacgttcgtctcacgcgttacggtacgtttaactgtcttcactcgataattttttaagcccgtcagattagctttaatcgccacattgaacgcctgaacattctgctgggccacttgccgtgaactactcgttgctgtcactcgcaagaccggtcgccgcgcaactggtgccgcttggaccgactcactcagttcctgaatcggttgccaaatgccataatgcgcataggcataagtgctggctcgagtcagcactgcactctggtgtggcatcacgttgaactgcgtgatagctttgatatcctggcgtcgctgacgttttagacgggctgttgacagccctgaacgtggcgtttgcgcaatccgaatatcaacagatgcttgatacaccggcttaggtagccatcgattgcccgcccatccaaggccgacgcttagcataatgatcagcaattcgagcggcaaccaccgccacgctaaaataaagcgttcctttggctgtaccttcatatgcctcactcactcccacgtagactaatttgaaattggctccagagataatcagtgaccaatagatgctgctgccccactgctttaaatcgccgatcaagcaaccgataacgtggctgtttctgaaccttttcagctgtcgtcaagtcaaatattaaccggtagcgatgcttggtggtcggtatcaaattcaccgcggtcactcgttgtgactgcgcatgatttagcttaacgcgaccaaccaacctgaccggacgcgtcaaccgattggcacgataaacggccaactgcgtaccgcgctgacgaaacaggtataagtgttgatcaatcaagctcattccagcaacttggcgcgctgggagctttcctagttgtaacgcgtgccaagctttgacccgtccagtcttcgtgagctgtccataatagagtttggcgcgactgctttggcgatcaaaccacaacaaccgctgaacgagtcgtacctggaaagacggcctgaacccgaccttgcttaaaatcagccccgttaaagttcaaccgttgatgttgccaatctttaaaattagtcgtccagtaacggtcttgcccatctatcaacgtcaagcgtccattcgcgtaccagacactcggccgcgacaattgcacgtgcggataactaattggtagtttcgtccatatccggccatcttggctggtactgatacgaccgtacgttgtcgcatcaccacgctgctgtcgattttgaaagaccggcgtggcggtattctgagtaccggcctgtaaataccgtgcttgacgtagcgtcttgcgtagctccaccgtcgtctgtgcagaacgatactttagatgcactgtttgattacggcgcggcaacaaagtcgccaatggatcgcgattcgttaagacatagccgttaatgccagactgaaataaattgcggtgattgaccttacctactaaggtaattggtccgggtgaaataatcggcgtcccattttgatcagtttgataaatccgcgtgaccgtgtcttgaccgcgctgaatactcagggcgtagcaagcatatcccaataatagtgcgagcaatgctaggctcccccacacaattgctagccgttttctcatcttcaatcatcacacattcttttatttggtcgttgcaaattccgacgcgactgtcactaaggccgcgtgaatcacttggtgcatgtcatagtagcgatactggcctagtcgaccaccaaagatgacttgcggttcagctgcggcgagcttcgcatactgtttgtagagcgtattgttggtttgattattgaccggataatacggctcgtcaccccgctgccagttcgctggaaattcacgcgtaatcacagtttgatccgcatcgcccttaccgaactcaaagtgtttgtgttcgataacccgggtatacggcgtctcagcatcagtgtaattgactacggcattaccttgataattatccacgggcacggtttcagtctcaaaacgtagtgaacggtaggctaattcccctaactgatagtcaaagaattggtcaatcatcccggtaaagacgactttcgggtattgggcaagatactcagccttatgcgcaaagaagtcggtgttcgtttccacggtaatttcaggatgagctaacatcttctcaacgatctgcgtataaccaccgatgggaataccttgataagtatcgttaaagtaattgttatcgtaagtgtagcgtaccggtaaccgccgaataatgaacgctggtaagtccgtagccttttgtccccactgcttttccgtataacccttgatcagcttttcgtaaatatcggtcccaatcaacgcaattgcttgttcctccaagttgcgtggttggtgatcaccgagattcgccgccgcgcgttgttccgcaatcttagcggctgcttctgccggtgtccgaacgccccagagttcactgaacgtattcatgttgaacggcaagttgtacatgtggcccttgtaattagcgactgggctattcgtataacggttaaattccgcaaattgattaacgtaatcccaaatttcacgatccgaagtgtggaagatatgagccccgtattggtggacttgaatccccgccacttccttagtgtagatattaccagcaatgtggtcgcgcttttcaatcactttgacccgtttaccgcgcaaggctgcttcatgagcaaagacggcaccaaatagtcccgcaccaactaccaaataatcgtattgttcgttcatgtgaattcccccaaaattaacttgttcttggtgaattataacaaacattacgtgataaacaatcgctcaacatacggatataatgggttttaatcaaatattggggcttgctaaattaagtttactatctaaataacaaataatattatgattaccggtttcaaccattgcggctaaatacaagcaatcatctgaatgcttgctggtggtcactggtcaaaagaccaataaacgttgctgtaaaaacagtaaaattatccattcgaattacaaaataaatctaaaaattaaattttgcttttccgtctaaaatgtcaccaaaacacaaaactagttgtgccaagaagttttttctcagcacaactagcttttaattcgttgttaataatgatgaagctgatgtccaaaattgagtcggcctggtttagtaatctgaccttaaattgcaataatcactggtttcgcctgtatacggttcccatgtcatcagacagttcaccgatcaggcccacactaaaacttctgtcccggcatgaagttgggattcaagccctcacgctcgcgactcgcatcacgtaacgcctccaagtaaactctgataaccattttgcgatagccacgataaaacggtccacagagtttaatggccaatcgggcgtagaatccaagcaaccatccgagactgaccaatgagtttgcacgccaccgcttaatcgtaatcaagcgattgcgctgcccgtaatagagacgccaatcgggtacgaatttagacttgaagtccagggaaggtaaagccgtcttgtgaattaatttagccgcactcacattgaccggtcgactcagcttggccgtccgtaccgcgtactcacagtcatcccaccagataaagtagccagcgtccgccactcccacttgcttgatcacagccacactcatgaaaacaccgcagaaagtgtactggtcaaactcaaaattaccgcgatattcactttcagggaccgcctgcgcttgaaaggtactccaattggtgaaccggttccgctgatccgcttgcaaacggccatcctcaatatacacactccccgtcaagatttggcgatttggatgattttgctgataagcaattagtttttcaaaatagtctggctcaaaaattgcatcatcatcggacattgaaacccaatccaagttcggatctgccgccgcaatctgcatcccccgagcaaagcccccagcaccaccgatatttttggtcaaataccggtaatcaacacttggattagccaaaatatcagctgtttgtaattcagcttttgtcccatccgtcgaatgattatcaataataataattttcgcgggtgggaccgtctgattcagtagtgccgtaattgattcgattagtaattgtttgcggttgaaagttaccacaatcgccccatattgcatgtttgtccactccttgtcttagcctaacgtcctttatggtaaataatcttgattgcgcccaagccggtcatgccaaccatcacggtaaccttgaacatacgcttttatcagtggccccgcttggccccatctatcccgaaaaagcaagatggcgaataatttgcgcgctaaaaagcgacgggtataccagcaggtaacccgagtttgcccacggtgtttgaataatgatgccagccgattacgcatcacgtaatattccttccacggcgctatagcagtacgagtatacgtcgttttgtgtaggaccaacgcgccgtggacatttagaaactgaccatacttgcgagcccggagcgcatattcaaagtcatcaaaccgaataaagtaatcctgttcaggtagcccaattcgttcaacaatgccgcgactcattaagatacccacaaacgaaaaaatatcatacttaaagtcctgcgcatagtcggcttcggctatgggcttaaccgtcagtgtttgcgaattggtaatcatttcacgatgcatcgcatcatggtgtccatttggtaataacaccgatcctgaaaatacgccttgttgcggctgagtcacaatcgctcgccgcatcgccgcaaagtagccggtctgaaaaatcgcatcatcatcagaaatcgagatccaatcacagtcagtctgcaatgctagccggattccagttgcaaaaccagcggaaccaccaagattttgctgacaacgaacgtaaaccaagtgttgatcatcaaagtcaaattgttgctgaataaacgcctccgtcccatccgtcgatgcgttatcgatgacgaagacatattctggcgcttccggctgcgtcaagacactctcaatagcctccgcaagtagcgctttacgattaaaagtcacaatcacacacgcaatttttgtcataagcttcccccaaattgttatgatcacttaaaactaatccgaattagtcagttaagctgactagccgtttcaagtaatttttcattatactagtctagtttgattatagctagacgtggtggttaggataaaatatttaaacctgatttttaaggggattaaacgtatttggaggttagtttggaaagatgcctatcattaactgtgtcgttatcaaaaacatgccttgatttcagagtaatttaaaaacacatcacaaaattagttaccgaagctaattttgtgatgcacactttcttaattctttttgattttctatgcaatccagtcgtcgaatacatccatcaattctctttcctcaggataatcaagataaataattaacctcgaccctatacttcagtaggcaaatcaattgatcatactgcttaatcatttaaatcaatcgtaattgttcaccctctaaatttaaaaactcatggaaccttagaattaagatcttacaatttgtgtatgaatcttgaggcatatatccaataaaagtattcatatcttcaggatagccctggttgtcataaaatttttcaatttcatccaataatttcttgtcatcagttacttcatcattgagcttggacagatagacaaacctaagttttctattctctagtttatactcatcattgtttttttcagatactaagttaaaatgacactttatttcaatcaatattcgtgatgagtccccgtcttcaactccccatgccaattgattgataaattcatcattaattccgccttccattagttcaacagcataatctgaaatagcttgaatggtaaaatacgccatttccatgccaacataaattgtttcccaattataggttaacctttttgctctcaaatcttttaacgttattaaattcataataagttcctttatttgtcgtgtgtttagttagacctcaaagttgtttggcctctaataataaatcttcgatgacttgcgtttaactaagttcctagccgcacagttcatcgtcatatttagttgattgaacatctttttacccagtgaccttcctcataactttcttaacagttgccaaaacattcgcacctttgttaacttagcaaatttataacatgttcgggatcattcagtattcttcctgatagcaacatcattgggcccacctctacacctaatttagtcactacattaattactatattactacctgtaatcgtcctaatatttagaatatgctaggttcatcaatattctaaaaaccaaccgatatccggcaaatggttttcgtcgaatatcggttggtttatctgattaattgatattgcctattcgcatgatgcttaatctaaattaatcagccatagtaaattagactaaccagcaaggctactgaccaataacaacactagttcctgtgtcatattttccaccatcatggctataactgaccatccagattaacgtatatccggacctttatcgcagtttgtttttttactctaattctccttctactatatctagcaaaaaatcaccaaaactattatataagacttcatttttttgaacgctttcagcaaatcctggaaaactaggaagtaattttaggctcttgatttgtatttaattctctataatttaaacaaagaatttcacccatctctgtattataaatcatcactaagtttgtgggcatctttaccaccctacgttcatccaaagttgcccaaactgcatcgggaactcctgaattttcaaaatcctcagtaaaaacaccatagatttcagccgcaccgaatgttaaggcgccatattccaataagaacttcctataatcagacggaaactgtacacctagttttgtttctcccattgctattaattcacttgacgccccaccaaaatgatctactaaatctttgttttcatgtattaaaatttttgcttggctataactgctcactatgcaatctccatttgtttataatcctttgcactattcttctaggaattcctttttcaactttcctggctgacgtttattcaattcttcagtcgttcctttattgctgtcctaacaatcttccatatgattaaactacccgaatttttcagcaattcatggtgatacttcaacatcaaccacatttttataaggttgcacttgctttggcaattcagtaggttaatttctcgtctgcttcatggttatctttatgatagttttaaattagagtcaagagaccctacacatttgattcgtcgaaactttgttcagttttcaaagatctaattccgtgcgttaatcgcttaacacaactattacataatatcatttcatcatttccttgtcaacaactttatttaagaagttgaataactatgcaaatgaatttgaaacgttattaccataacataatcgttaacacctcaatcagttgaattgttaacgcgacaagaaatatcttatcattagcgattactcatgtcaataacttttttgctgttttgaatatttattcacttacaacaatttgaaatgaaacaatgtaagtgctagcggctagctgtttaacagcagtgctcgcagcgacaagatatatattatcaagtattagtatgcaggtcaaccctttattcgaatttattttgataaattcgtaaacggcattgtttcactcacacgaacactcgtaaataactcgtgcaattcactggctagaacaaactcgagcccttgacgatcaaactttgcacgtacctgcccgtcaacagctaggtggtcaaagacaaagaccgcaactttttcatcatccaactcagccataatcgaatcatacaagcgcaattggtcaacatcaataccaatcgtatatcgcaaatcccacaatactgacgctaagggcgaatgccctgctcgtactggcaactgataaaaattgtatccattagtagaatgcttaactaaaaagtgcgacccttgctggtcattataaataattgtcccggcaacttttttctgcactaatactcacccgctttcaatcgatttagtgaatccgaagtccaactcgctaaatgattggcaattggttcaaagccagcatgaacatgccgattcgtccaaaaatgcttatgccgaaaagtcttgtagatttccaaatcattgaccgtcggatgcggttgatgctcgatacaacgtaatgacaagctgatttttccagtatattcgtcaatatctaaaataataacatctacggcttgaccaacctttagatactcagtaatacttttaacgtatccttcatgacactctgaaatgtgaatcaatccctgatgctcaccatctaaggtgacaaaagcaccatatggttgaataccagtgactcgtccgtgtacccgcataccaattcgataattgctcacgatcataccatcctttctcattcattctatattgtcgataattctaatccccaatattataacctgaatacagcggattgcaaaatcgtaattgcaaaaaaagaaacccgcagccgcagatttctttcaaactaactaatcctcaattgtaattgtttcgatcacaacatccttcactggtttatcctgcataccagtctcagtggccgcaatcttatcaacgatatccatcccatcactaactgcaccaaaaacagtgtgccggaaatctagccagggcgtgccaccattgccatacgcagtcacgatttcttccggataaccagcttgcttcatctgatcactcatcccagcatctaattgtggcttttgaacgataaagaattggctaccgttcgtattaggaccagcgttggccattgataatgcccctcgcaagttgaaaacctcttgtgagaattcatcttcaaatggtttaccccacaaactttcgccacccatcccggtaccggttggatcgccaccctgaatcataaaatcaggaatgacccggtggaagataatgccatcgtagtaacccttctgagctaaaccaacaaagttttcaacactcttgggggcctgctttggaaatagttgaaccttaatatcaccaaagttagttttgattgttgcttttggtccatcgacctgacttaaatctaattgcggaaatgccacaaaatcacccgttttctattaagattatcttgataatacaagagaactcgattaaatgctagccatttgtaaggatttcttgcgattagcgactaagcatagtatttcgactgattttctggtaacctagataggattaatttcacattacttggaggtaaccatgagttttttaatcgattttgtgttgcacattgaccaacacttagtcaccatcgtgaatagttttggaatctggacctacctaattctctttgccatcatcttcattgagactggcgcggtcattttaccatttcttcccggtgactcccttttatttgcagcttgcgcactcgccgctaatccaacctatggcttacatatctggacttttgtcattctcttcttggtggcagctttggcgggcgactcacttaacttctatattggtcatttcctaggagaacgcctaactgaaacatcctggtttggtagactgatcaatcaaaaacagctggcaaagtccgaaaaattcttcgaaaaacatggtggcatcaccgtgaccatcgcacgcttcatgccaatcatccgaacctttgtcccatttgtagctgccagttcgcgaatgaagtatcaacaattcattcgctacaacgttatcggctgtgtcctgtgggtcattctctgttgtggtggtggctactacttcggtaatatcccgttcgttaaggaacacttttcgatggttgtcattggaatcatcctggtttcactgattccagctgtcttctctgctatccgcgcacgctttagccatccaactgaaaacgaagattaatccaattataaaaggccgatcagctaataatagctgaccggccttttataatctaacttaaaatgcagtgtccactgtaaatactcttcattaatccgcttcacgtaacgcttgtctgccgatactgagtaagtaaaaaaaagaccactcaatcaggataaacgctagaacaaagcactgaccgaagaacgtatccggcaagaccaaaatgattcggtccaatagtggatcgaacaaccagtccgaattgcgaaataagatcttatggaacatgataaagaactgatcaaaattgatagccattataacggtcactactggtggtacccagagggctgtctgcatcggtaatactaaccgccacaattgtcgatcacgtcgtagtcgctgccaaaaaaaatagaccacaacactcgtgacgataaacacaccgtaatcaagcataaatagattcttcacatccgcaaagtgaaccaacgcactcgtcgaatccgtaaaatcgttcatagttaatttgggtacccacggaaagttaagatatgctaacagctgatagtagttcgtcatcagccgtcccaatgtcaaattcacagttgcgcctaacttttgaccaaccgcattggcaaaatacaaccagctcgcgttgattgttacaattatcgtgccactcactaaccataagtataaactcagccactgagccgcatttttaaatttatttagccacaccatcgtctaggtcccattcgtccaaagaattgatctcattagttggtttgacggcctgttgtgccactagttcaggggtagagacaccggtatacaccaataaggagtcaatcccaaagttaattgccgctgagatatccgtcatataattgtcaccaaccatcacacaatcgtgcttatcgagaccaatccggtcgaccgctttctgcataataattgtctccggcttaccgatgtaagttgcacgttgttgggtggcccgttcgaccatcgcaattactgaaccagcacctggcactagcccccgctcatttggaagattagtatccgcgttggtgccaatgaacttagccccccgcttaattgccagcgtagcaagttcaaatttatggtaggtcgcatcatagtctaaaccaacgattacgaatctaggtgtgcgctcatcgaacttgaagcccttttccaacattgcacccttcaagccaagttccccgatgacgtacatcgttttatcaccatcacctgcaaggtcattaacatagtctgcagtcgctaacgctgccgtataaacattcgcaggactcacatgaatatcatgattgttcgctaagtttgcagccacatcttctggtgatttagtcgtgttattcgtgaccaataaaaaatcagtctgactagcctgtagtcgttcaataaaccgtttagcagcaggaatacgttcccgaccacgataaactgttccatctaaatcaattaaataacccttgtacttacccaatcaaaatacctctctctgttcctacttttgtcgaatcgtaaagtggcgtttaccactactctgcttcgttgtttgcgcttgcttaccattaccggccgtaactttcgccggttgccgccgcttttcagtaaacggtgcggccttctgcttagtggtgaagctatgagacttccgccgttgtttgctgcgactactgttacggttactccgcgctcgggattgccgactattagtgtttttctttccccgccgatcatccttacgtgagcgactggtacgcttaggtttaatgacccgttcgtttttaatgataaaataggcgcaaccaaaattacaatattcgtacagatagtcttggaccgccccaatcgtctgtgagcgctggacatctttcatatcatcacggaaaaaaccttttaaccgtaactgttcaaaaccccaatcaccgacaatataatcatatttatttaaaattgagctgtagcgctcaacgaacttgtcgaggtcaaacccttggcgataatcgtacacgatttcaaacgggtgcttgctaacttcaaagtgggtcttatcagttcgtaatccatgatacaaattgcgccgccgttccgcttgttgttcagctagttcatcaatatgttcgcgattcacattgacaccacctttctcttatttaaccggccatcgacgcattaagtaatcgccaacgaccgttcttaacatggcttcaaataatatctcagttcgaccactgatattaatggtcgggaaaaacggaatgaataaatcatgatctaataacgcaatctggtacgtttgttgccgattgaccggctgaccattcactagtaatgtatgctgtcccgttttccacgtgaggccctggtactggatataaccaaagacttgaccacgaaatcccattcctttaatcggaaatttgttcaaaaacgggcgaactaactccatctcatagactaagcgccacaatgcttcaccacttaacgtcactcgaataacatgcatcgcgtgaggtagcatggtatgtaaatcatttcggttgaccatgcctgcgggaagatcccgcatgaacaggccaccgttcaacatacctagatcagttttggcatagtccgtaatggccgctagcccgagggccgtcaaatcacttgcatggtgccaatgtggccgcagctgcgtcggcaccttcgcaacaacttgccgcgtgagtaacgtttcaccctgttgctcccagccagtaatcaacgtttcatcaccggccacaattggtaagctggccgtggcaacagtatgcgccgcggccgctttaacgtgatgttgatgatcaatcgtcagttcaattcgcccaatatactcaccgtattttccagctgccgctatcaggaccccatttttcagttcaccgttcaccagtaaatgatgcgtatgactgccaataacaacatcgatcaccggaaactgttttgctaaccaccgatcgacattgataccaaggtgggacatcacgattaagacatcatattgccctgcatattgtcgtaacaactctgggaatcgcgtcttaacactggccggcgtccaaccgttcaacgggtaagtcaacgtaaacggtgccgtaaatgccagcaacaagactcgtgtcccccgtgcagttgtaatgattttagctggtaatgcccactgcggcggtcgttgcgttgcagtatctgtcaaattatcgagaacaacatcaaagttggcgcggtcatacaaccggtttaaggccgcgtgcgttaaacccagtccttcattattgccaatcgtgaccgcatcatagccaatcgcgttcaataacgccacgttggcctgcccttgagtggcttctgagagtggatgggcacgatcaaccgcgtcgccgaggtcaaccgtgatcacatggcttccagattgccggcgctgctcacgttcggttaataaataccgttgaatacgtggccagttttcaaaatgcgaatgaatatcattggtatgcagaatcgtgacttgctcgtccacggtcaatcgcccctcaatcgttgtctttgttaatcctaaagcattcaccaaagtcggtcaagcactcgcttactggcgcttggcaaaatcaatggctttaccgtcaaccatctgctcgatctcggccagtgaaaatggcgttccaaagggcaccggatggtctaagtaatcgacttctggtgtatcgacacccacgttgatgttctccttgacgttgacggcataatgatgaatatgcccgtgcaaattgataatttgtttgacgatccccatcatcattgggtagtgcgttatatagtattggcggtggtcgtacttaatcagtacccccacgtcgtgaaactcaaacttcggttgaccattcaactgtggatcatgagcagccaaatacttaaagaaggcccgtgaatcatggtttccctttataaaaatgattttgccatttaactgtgctaagagtgcaaaaacccgctcataagacaatttcgctggtcgcgtaaaatacagcgcaacatcgcctaaatgatagactgtatcctgatccgtcacacgggcattccaatggtcaacaatcgcttggttcattgtctctacatctggaaatagccggggcgcaaagtcgttgtcccccaacaaatcagcatgataaaaatgtgtgtcggacgtaaaatattgcatcgttcaaacctcttattcgtatatttacatttgtaacatcaatcggatgtgtcatgtctagcgaatttcatgacttttgcttgaaaagctgacttatccgttcgtcagcatatacccatgtcagtcattcgaatcctattacgactgtcagtcatcatatggcacactaactcggcaagtttatactaaacaaaccgtttccaccgagtcaaagctgacagttttggcacttactgaacagcacgtattaatcatgaaccattttaaagaacacctgacacaacgcgttagtcatttatcattgtaccgcgcaccgttctaaaagacactagaacagttttaagtttattgctttgtcagcactggaaccatgttttatgaccaacccatattcacaaatctagctaatatcgtcaaaaagtgcacttaactgcaatcggcagagttaagtgcacttcataaatcccattagttaacctacttgatagccaatcagcactcctggttattgctgactagtcgtgtgtccgttgacgaattcggtcactaacgatcttgacaatgtataagccaaccacccagaccgctgacacgagtaacgcgattaacgtttcaaacttcagacagagaacaacagcgataaaagctaagaacactagaatgaagtaatcagataacggaaacagtggcatctggaatttcactttagcctgactgcccgcttgacgtcgatacttgatatgtgcgacgacgattgcgccccaaataaagataaaacaagtagtcgatacactcgcaatcagcgagaagactttcccaggcatcagtaagtttagaattactgacaacccaatcaccagcgtcgagaaccataacgcattgcggggaacttggcgggtcgatagtgtccccattcgtttggcaaacttgcttttgccatcatacgttagtgagaataacatccgcccggtactgaataacgcactattacaactagaagcggccgccgtgagcactacgaagttgataatcgcagccgctgaacgaattcccaaattggtgaatacttgtacgaacgggctgtgtgccgatgaaaagtattgccacgggtacatacacattagaaagaatagtgacccaacataaaacagaatgatccgcacgggaatatcattgattgctttgggaatcaccgtcttcggatcagccgtctcagaagctgtcatgccgaccatctcgatcccaataaaactgaacaggaccatctggaaggaaagcactaagcctttgattccgtgtggcataaaaccgccataactaaccaaattggttaagctggcgtggcccacaggggtcttaacgctaaacaagaccataccaatcccaacagcaattaatgccaagatagcagcgatcttaataatcgcaaaccaaaattcagtttcaccgaacgctgagacattaatagaattcaagcccagcaataaaatcaagataatcagccccggaagccattgcggtaacttaggccaccaaaactgcatatactcaccagcagcagtaatttcggccatcgcaatcgtgatccagcaaacccaatacgtccatccagccacaaagccggtcttatcacctaagtattgcttaataaaatcaatataagaatgcgtatgaaggtcagataacagtagttcacctaacgcccgcattaataaaaagcacactaaaccggtcactaagtatgcgatcaggatcgctggccccgccaagtggatagattgaccggcccctaagaacagtccggtcccaatcgtgccgccgatggcaattaattgaacatggcggctttttaagcctcgcgagagttgttccgtcgcaggctgtgaattttctttcgtcattatctttgcactccccttgaaattattatagcggccaaattcctagcattcaaaaggccacgcttaagaaaatcacacgattggactataccattgttcgctaacgaaattcatcttatgtacgcgtaagcgtttgctaacttgcatggctgggattcagctttgttagttgactaaaccagggaacgctcccgctacgtgaataaagtgaaggcaacgcatactaacatgaataactttcacttcagcatctaaaaaagcacccggattttcatccgcgtgcctctttacaaccttaatcatattgaaacgatgctgatcactgattctgagccacgcgctcaacatcgcgggcaatcataagttcttcatcagtaggaatgagtaacgtccgaatcttcgcatcggtcgtactcaggtcccgttcgacaccactgacttgattcttagtcgggtcaatcgcgacgccaaagtaggtcaaccgatccgcgattcgttgtcgcatccgtgcatcccgttcaccgataccagccgttatcactaatgcatccgcaccttgtagctcagccaaataagcaccgacatacttaacgatccgattgacaaaaatatcaatagctaactgagcctgtgagtcctcatcataacgtgcctcgagctcctgcatatctgcagaaccagctagccccagtaagcctgactgcgtattcaaaatcgttaacatttcatcaggatcgctaatattaagctttttcatgagataagcaaccagcgacggatccacatcgcccgagcgcgttgccattgtaataccagctaacggcgtaaatcccatcgaggtatctagtgactgtccatgatcaatcgccgtaatcgaacttcccgcacctaaatgcaacgtaatcagcttcaacgtttcgagcggtcggcccaataatttagctgctcgcaccgcgacgtagcgatggctcgttccatgagcgccaaacttgcgagcaccatatcgttgatagtaatcatacggtaacgagtatagatagttaaccgccggcatacttgcatgaaacgccgtatcaaagacagcgaccgcgggcacatgtggtagtacccgcttgaaagcacgaataccgaccgcattagccggattatgcaatggcgcatattcggccagatccgtaatctgcttaagcacttggtcagtgattaaaactgaatcatggaattgctcgccaccggcaacgacccggtgaccgaccccagtaatttcatcatatgagtcaataattcgcaatttaattaactcatccaaaacgatattcacggcagccaaatggtccgcgactacggctttctcttggtaatgatgatcaacgccatagcgaatattgaccggtgaagttttgaatccaattcgttcaacagcgccctgtgcaatcacccgttcctgtggcatttcaaataacttaaatttcaacgtcgaactaccagcgttgatggcaatggtcttccccaaacgacacactcctagcgaataatattctggtcgacccacgcatcaatttgagcggtaaacgcttgaaaggcacgttgatcctcaaatgatggaaagtcgcctagtaatactttacctgcttggtgggcccgttgtccatgtttctgtaaaacaacaattgattttcgtgatttttcatcaagaaaaaggttagtcggcaagttcaacagaccttggaggtaagccgcagtgctcatccattttaacagtccttgagactcttgcgactgaaaaatcgtcgttggaacaaggaaaacaccccagccgcccggtaacaaatgagccatcgcttgctccatcatcaaatgatgaatgtaagaatgaccattcgtcgctttcgtttgaaaaccttggacacggtcatccaatgggtagtaccccactggcaaatcaccaattacaacggtcgttttcggcatgaccagggaatcaattgcgtcttgatgaaacaactccactgctgatcgttggagatccatgctcatcgcggcgattgccaactgattatcatcattatcgactccgtaaccctgaatcggacgtggccggtccgtctgcaactgatttatgaccgtagttaataagttaccagtcccgacagcaatatccaaaattgacaaatcagtcgtcgatccaactaacttagcaatcaagtatgccgttaacagtccaatcgaatctggtgtcatttgatggtttggatcaacgtgatcattatgaatcgcctttagtaaggccaactgaagcgcacgccgaattgtttcggcgtccaattgttttaagtcgatcgtttgatagagctttgttaaagctgccgtctgttccggatttggcttgccatcctcaacatgtacagattggcttaataaattatcgccagtctcaatgagcgcatccacgtaagaaacggatagttgttgcatcaaaacttgaactgattgatctaagacctgaaaaagcgtctcggtttctgcttgtgccagaatactcaccctcccgcaaaatctgtaatccttaaccatattactgattttacgcgttaagttcaagtcacggggttcactcaccaatcaagggagcgaattatgctgataagggtgctcataggattgtaaaatcaagcgatataacgtctggcgagactgaaaattaacgtatcgttgggtttcaaacgccccaccaattaacaataagctaatcaccgaaagcaggatcgttccgcgtcgcttcctcatctaccattgtcctccgatctggtaacagtaattgggcttgaaaatgaatccccttatcagtcgtcatcgtcagggtcaaatcatcggccacgtgaaattgccgaacgccctgcatcagattgatttcaccaccaccatagtggcgcaatccgattcgatgtaggatatgataataagtcaataaatactgtttgccggtgaccgtattaaccaaatgaacggcttttcccggcgtcagaccaccctcatcggaaatatggtccaccacaaaatggtgatccggattttcaagctcgtgaagcatcaaataccaatccactgttggcaaatccacttgggtgcgccgggccaaattgcgctgtccctgaaaaagtgtcgtcagcactacggccacgattgctaacgacacaacggcttcaattaacgtaaaaccgcgccgcctaatcatgtgcttgctccggtatcctggataatagctgctgacgttgccggtcttcatattgttttctggctgtctgaatcgcctgcaaggtctggcgttcatgtgactgcatcataatctctaaactttcaaacccaatcaaaccacccatcaatagccccagagcagtaatcgtttcaatcatcaaaaaacccattcgcgtctttaacatgtgtgactttataggccccccaccccatcaaagcattcagtttgattttctgcttcggctgtaattgcgacttgaaaataaccactgctagctgtggatgcccatttttctggatttgaatatcacgaccgcgctctgtttttaatgttgcaggcagtgggagatgccactgtgggccactgataggccgcccccgcttgccaccccaagtcacgacttccgtgccacgaaagctcacgacctggggctgacccgtcacactagcggttaaggtctgttgctgccacatcgtttgtaactcccgccagaaagcctgttccgcattctgttggcgttgccgtgtgggaaaacggtgcacagcaatcaccgccacactagccacgatcgccaagaccgctaccgtttcgattaaggtaaatccctgtcgcttaaccaccaactactttttgtggttgcggccgtaccggactaatgccctgtgacttagcctgcttatattgaccatcgttaatatatcccttgttccgaagttcttctaacattgcgtcgtcatccgtgacggtcttacccgtatcattcgcatacatttcagcctgattttgaacaacttcagtcagggcttcttgttggcgaccagccgcctgtttacgttgttgattcaaattgggcaccacgatcaacatcaagagactgatgatcgccaatacgatcaccatttcaattaaggtaaaaccgcgctgtggtgctgccgtttttttcatcaagcgtttcattaataatgtcattttaaaatctcccccattgattgatacatcggtaataacaaactcaagtatgtgccgacaacgacgagtgcaataatgccaaacatgatgggttgaatccaaccaatcatccggttcaactgtcgaatcaagcgttcgtactgcaaagttgcaaagtatagtaattcctgacttaactgttctgccggactctctttgccgaccagtagtgctaactcatcaggtaataatcggtcctcctggataattgtgactaacgaagtcccagtcagtaacgcctgttcgataacctgcccttgctgataaatcagcgccttagtttgaaagtgctgactgacttcacaaatgccacgaatccctaaaccaccagtcagcagcatacccgcattaaggcttaaatagtaaccacagtagtttctgatcaggggaccaatcaaggggacttgagccaaccactgatagcgccgccgaatgggtaatcggctaacttgaaggccaaccagcaataagcaaatcaccaaggtaatgaccgtgataccgctaaaccattgccaattcgcgattgtcccactaccattaccaccatgagcaagactcggtaaaatcgcagctttgaccgtgcctaaagttcccagcagtagaattaacagcagacaagggtactgtaacaaccgccgaatttggcgtccctgttcagcacgcgctcgcattaattgacctgcctgcatcaaggtccggcgtaattcaccatgagtctcagcaattaagaactggtaatacaagtccaccgcaatgtatggacgcagcgccatagacaaatcatcacccgcggctaaacgccccagcgcgggctgcaaggattgaaaggccggtccttctacatccaatgtaaattgaaaggcttgctgaaacgagaagccgttgcctagcaagtcggctagcgtttcaaacagcttcgcctgcatagcaatcggaagccgtttacgcttccttaagttgattggccgtcgcatgatcgagacggcccgctgccaattgttcatcaattaactccgcccacctttcagtcatcatttgcgacgttttgggccttgcatgcggtaacacgaccgtatcgaaaatcgtcgccacgctgccatccgtcactggtacgaggcgctgataggacattgcagttaaagcctgctccaaaacagcggcttccactcccaattgcgtcaaccggggaataatcccgtagacaccgcgcgcatgaatagtacttaaaactaagtgaccacttagcgctgcctgtaccgcaatccgagccgtttcggcatcacgaatctcaccaataataaagacgtcgggatggtggcgtaacccaaccttcagtaagtcgccatacgccatctgggccggcgtgtttacttgtagttgtaaaaattgtggttcataaatttcaaccggatcttcgatcgtcatgactagccgttggccacgaagctgccgcacaagatcatacatcgtggaagttttgccagaacccatcggcccggaaaataagatcaatcccgttcgtcgcattaattgactcaattgttgccgttgctgtgggaccaaatagctcaattttcgggccggaccttcatacaataaccggacaaccaacgactcacggtccaaaaagtcgccaactgccgagattcgcaaatttaaagtttgctctgccaatgttaacgtcatcgcccctaattggggccgccgatgatcactaatcgccatgttactacggtatttgatgtgattcatcaattgctgggccaactcagttgtaatctgagtaagtgcccgcaaactgcctgctgcttgcactaacacctgatacccttctgccgtgggtaaccaataaatatcactggcccgctgattcacggctgcctgaatgatttcgttcaactctgcttcaatcaccatttatcatggtcacgctcctttcaatcattagtttcgtaacaacgaccactttccacgaaaaaaatgacatttattttggcatcaaaaaagctgttccagaaataacaaattatttccagaacagctcgtcatcgcatattttcatttgcaatcctaacatacggcgttataagcgccccgatataaaccaattaaggcgttaggcccgctcagccgcttcaatggcttccttagttggaatcgatggttgcgcacccaatttttgaacagctatcgaagatgcccggttggcaaaccgtaccgcagcggccaaattactaaagtctggcattaagaccgaactgagtgcaccaataaaggtgtccccagctgcagtcgtgtcaacggcctcaaccttataagctgggacgaagccgtgctcagcaccgcgcatccagaaagcgcctttactcccaacggtaatgatcacgttagcaacgcccagcgcctgcaacttctgtgcaccctgaatcatcgattgctcatcagtaatgtgcacgccagtcaaggtttccgtctcagtttcgttaggaacaattaagtcggtcgtcgctagtaattctgcgggcaccgtcgtcgtagctggtgccgggtttaaaatcgttttttgcccagcggcctgagccaattcaaaccctcgaatcgttgctgcaatcggcgtttcaaactgtgcaatcaaaaaagtactagcgctaattgcgggttgggcccgttcgacatcttcggccgtaacctgctgattagttccaccatcgattaagatacggttctcactactactatctaacaagatgaaagctgagccggtactagccacattgctatgttgaacatattggtcattaacaccactattcgtcaactgctgcaccataaaggccccttcctgatcagtaccaactttaccgataaaagtcgtttgggcaccagcgcgcgcggctgcgatggcttggttagcccctttacccccaccagcgacactcttaccagtcagcggtagcgtttcaccaggcttaggaaaacgcttgaaacgcaaaatcgaatcaacattcaaactacctagtacggttactttattcatgattattcgtcccttcagtattcaactgctctaattttagcaaactggcctgttcgacgcacttgttttactaatattttaagcaataaaaaacgtggttcttgatttatcatcaaagaaccacgtcttttcatcattaatctgggtagttagcagcttcgtatacttctgatacgtcgtcgttatcttccaattcatcaatcatgtgttgtaacttttccactttatcagcaggaacgtccgttaggttttcaggaatcatggttaattcagctgtttccaacttgtaaccattagcttcgagggcatcacgaacggcagctaattgtttaggatcagtgtaaatttcaaacgcttcgtcgcttgattgtaaatcgtcgccaccagcatctaaaacgtccatcaacatcgtatcttcgtcggtatctaaatcttcgcgactgatcacgatgtaacccttacgatcaaacatgtaactaaccgcaccagttgcggctaaagccccaccatgatgcgtgaacgctgaacgaaccgccgcagcagtccggtttttgttatcagttaatgcgtgaaccagaacggcgataccaccagggccgtagccttcgtaagtaacttcttcgtagttctccgcaccggagccactacctttatcaaccgcccgtttaatattgtctttaggcatgttggcagctttggccttatccataactaaccgcaattgcgcgttagaatctggatcaggacccccggcttttacagccatataaagttcacgggaaatcttttgaaagactttcccacgtttagcatcttgggcgttcttacgtccttgaatgttatgccattttgaatgtcctgacatgtgtgactccttctttcatatttattttcagtttagtagataaacatacgtaaagtatgatagcaaaaaaagcgagcgatttcaagcactagaaccaagggcgtccaagttctgcgatttttattgcaaatctaatgaaccagtttcgttattggactctctttcagatttgaaatttcagtttgctaatgacaaccacaaccacgacaaactggtgttatggccgtaaatatgcgtaacccacagcttgcaagtccacgattcgcaccacaccagcgggaacgaccgtcacactggcaggaagttgggccgcagtcatttgatgactcaccatggcattatggcaagcatcaatctcaacttgcggtaacgtctgttgtaatggcttccaggcaccagttaccagcgtcgtgatagcgggcccgttgaccacaaccaccaccgtactagttggccgggctgccaaaaaattctgcacattgcttatggccgttgcgaccttagccggctcgtcgacatggactactaagttagtcattcgcttgtcctccctcgatcgaccgcagttcgagtgcgcgtagatagtgatagctactcaacatgttagcgcaggtcgcatccgtttcatccggcacttcataaatcatggtagcgtgcgggttgaggactggtaacacccgctgccagtcaatcagtccctgccctaaaggtaaactatcgtgccgcgtccccatcgaatcaaccaaatgataatgttgaatgagtggagccagccgcttcaaagccaacatggtcaattccatatcaccgtgcagcgcaatgaagacgtggctcaaatcacaaaccagcggataatgatgctgaatgatacgctcatctaactggggatcaccatacataaaacttgccgttaccccattttcaatcacgacatgtccactcgcctgacaaaccaaattatccaaccgctcaaagaccacgtcacgtgcaacctgcaaggactcatactcatcgatcaagcgcccactgtcgctaccatagccaccgtgtacgagcaccttgacatccaattccgtcgccaacgcaagtaactgggccgtactcgtttgtaggaattggtacgccgcagcttcacgatgtggatcaagcaattgatcaagatgaacgccttgataactcatagggtgatgaatcacaatttgctcggtgacagttgtctttacaaattggacagctgttttaagtgtctgaaatgcttccggttcaaagtccgtggcactcgtaaaaaattcaaatacttcgggccggtattacaaacgatccattaattgtgcgggtgcttgggacgccttcaagcctaacttaatttttccgggccgtggccgcattattagttgtgtcatccgtttaactcatcctttcacgcattccaaaaccaaaaaaggcttggaataaatattccaaacctagtataacgctatcgttctaaattatgccaacgtcactagctggcagacaaccgaacttaatcagcagacttggttgagccccgccgaacaatgccgtatggcaaggtgaccgtcttctcgtcaagttctttatcgttcatcaacttagttaacatccgcatggcaaccgcaccaatatcatataatggttgggtaatcgaggtaatggctggacgcgtgatttgggtaataatcgtatcattactcgtcacaacttccaagtcatctggaacgttgatcccggattccatacttgcgttgataagaccagccgccatttcgtcgtccccaacgaataccgcagtagcgccactatccgcaatgactggttgtaacttccgcccagcatcatatgagtagcccgcttcataaacgagggcgtcgtcaaacggaatcttagccttggttaaggcccgtttgtaacccgtcagtcggtattcagcgttgattgattgtgacaatgagcctaaagccaacgcgatcttcttgtgaccacgtgcaattaagttagtgaccacttcttcaacagctgcagcgtagtcgatattaacgcttggcgtttcattgttcggatcaaccgtcccagctaaaacaactggtgccttggcccgtttgaattcagcccggagcttgtcatcaatatggttacccataaagatgaccccgtcaacttgcttagccatcaacgtattcaacacgttgacttcttgttcacccgcatcatcggagttcgttaaaatgatattgtacttgtacatcatcgcaatatcatcaatcccgcgtgctaacgccgcaaaataaatgttggtcacgtccgggatgattaccccgaccgtagttgaacgcttacttgctaaccctcgtgcaactgcgttaggccggtaatctaaccgttcaatgacagctagtacctttttacgcgttgcgggtttaacgttgggattaccattgacgactcgtgaaactgtggccattgaaaccgccgcttcgcgtgccacatcataaattgttactgtttgtttttccatataaaaatagccctttcttgcttggtatcatatgttttcatccgttttcatgcaacatcaaccaatatagcaaaattacgcttccaatgcaacttaagattgttattgaaatcgctttcatgaaaataataccgtacttgttttcaaaatgcaagatttaccacacgaagattgttattttgggctcattattctcagctttttatcatcaacagcgctatactagtattattatctattattttatctaaggagtgtttgaattgacagattatacgaaactgcaacaagtccgtcaatggacccaagacaatcacgttgacgtgacctacatcagtaactttcacacaatttcatatttgactggttttgagagcaacccctacgaacggacgctagcactgtttgttttcgcggatgcggaaccatttctctttgcacccgctctcgaagttgaagcaatcaaggagatgggctggccttacaaagttttcggctacctcgaccatgaagatccatacgcgctaattgctgatcacattcacgcacaattgactgatcctaaagtttgggcccttgaaactgggaacttgacgttagaccgctttaccgcgctcaaacagcaatttccagctgcccacttcgataaggatctatcaccttatattcagcaattacggctggtcaaaacagctgatgaacttgaaaaactaaacattgccggtaaatgggccgactttgcttttgaacaaggatttgctgctgtcaaggcgggtcgcaccgaacaacagattgctgccgaattacagtatgccttaatgaaaaagggaattatggaaatgagtttcgacactttagtccaagctggtgaacatgccgccaacccccatggtgcaactaacgaagcccaagtcaagccaaatgaattagtgctattcgacctcggcgtcatgtatgaaggctatgcttctgatgcttcccggacaattgcttatggccaaccgagtgccaagcaaaaggaaatctttgacgtctgtctggaagccaacttgactgctcaagcggccattaaaccaggcatggcagccgaagatgtcgataaaatcgcacgcgatatcatcaccaaagcgggctatggcgaatacttcattcaccggttaggtcacggaatcggccaaactgaccacgaatttccttcgattatggctggtaaccacatgccactcgttgaaggcatgtgcttctcagtagaacctgggatctacattcccggcgtagctggtgttcgaatcgaagactgtggggtcgttactaaggaaggctttaagccatttacccatacgccaaaagaattaaaagtattagatctttaattaaaaacgtcaagagggccgtcacgacataatccgtgacggccctctttttttacctagcgttgactggtacttgcttttagtgttattccggtagcggatgttcggtttcataatcagccacttcggctaacagtgccgccgtcgttttcaatggcagcacgtcacagtcaaccgcggcttcactccccgcctgactcgcacgccgataaacatcaatcttatgattgactttttgcaaattcaacaaggattgatggatttgcgcttcaacagcctggcgttgctcttcaaacattgctagccgttgatcaatcgttccatccccatcggcacaccaactaataaattgtcgaatatcctctaacggcatcccggtctgcttaagacaacgaatcaatgccagtgaatccaagtcttcatcattgaagacccggcggccctgcttatcacgcttcacaaagggcgttaagcccgccttatcataatagcgcagtgtataacttgaaataccggtctttttggcgaccgctccgattgaatacaatgtgattcctcctcaaaagcagataggacaccgagcacttgctcagtgtcctatcttatcgctgtcagcttacttggctggtgacgattcatccgttgtcgattcatcatcagacttcgcaggtgttgcgtccttagcaggtgctgattctggtacgggcgctgaagtcttctcgtcctcgccagctttttgataagcagctccaccatcaatgacgatatcttcatcatcaccttcatcatcttcgaccttagctaattcagaccgtaaactatccgtagcttggtcaagacttgagccaaagctttcacccgtttcctgcttagcggcttgatactggtcagcaaaatcggccacttttcgctttgtatcttcaaattgttgcccagcttcagccttgaagtcttcagcagcatcgttggcatagaacgcatagtcgattgcccgatccttaaaatcggcaattccttgctgtgctttagctttcaattcagcctttttatcatcatccatcttcataacggcggtagcaatcgctgcaccacctaaaacaacacctaataagaatccctttttcgacataattaagactcctcactattattttttgaacgtcgattacgatagacatcaaaagcggctttgccgaccttgcttgcgctggagaacttgctccgcttctcattgttcttgccaatcttggctgttaagtctcgagtcgcagcatttaagtcagagacgctctgacctaagtcgcccatcgcttgaaacgctggatcaattgttgcaactttgccgttaacatcctttaagagttcattggcatttgccatgattttttcagtctcatgtgacaaggcgtcaacatcatccgtaatattatttaaactacggttgacttcccccatcgttttagtaatccgcattaaaaaaatcccgataaagcatactaataataagaacgcaatggcggcaatgatgcccgcaatgtgtgtaatcatcctaaaattcctccttcaacagccatgatattaaaactagcatagcattgtctttagtataccgcaattaaaaaagtgcttacaacattcacccagtcacatttggtcgcaataacttgatcacggcttggttgcccgcgtcaaatctgataaactagtgaacagacaacaataacgagggtgaagatatgtttaattcaattaacctagcagcggttgacacaccgactaaacaagtttcggtgtggatgaagttggctaagaaaattgactggcaacaaattattattaatattggcggcaagctactcgaaatcattttatttattttactattttgggtgattgatcggctaggaaaacgcctgatccaccacttatttttaacgaatgctaataccagtgatactgccaataatcggatttcaacgatttttacattatcattaaatatctaccattacgtcatcatgttttttggcatctatgcggtactttcagtgttaggtgttcccgtggggacgttgattgctagtgctgggattttcagtgtggcgttaggtttaggcgcccaaggcttcgtcagtgacattgtcaccgggttcttcattctacttgaagatcagattgatgttggggattacgtcaaaatcgaaaccattgaggggaccgtctccgcaatcggtttacggacaactcaagttacgagtcccgatggcacgttgaactttattcccaatcgcaagattttaatcattagcaaccagtcgcgtaacgatatgcgcgtgctgattgacctctacattctcacaacgactcccgttcaagatctgactaacgtggtccgcgaaactaatgccgacctcgtgcctcagtatcctgatatcatcggtgagcccgacattcaaggcgtcacgacacaagccgatgggacgttggtcttccgagtacaattttacgtcaaaaatggcatgcagttcgcaattcagcgcgactttttggccgcctacttgaacgcggcccgagcagcgggaattcaactcccctcgccacgtttaaatatcgccccaacgcacaagtaagctcaaccaacacaagcccgcacagcggttgctcagaaatgagcgccacggtgcgggcttgatctttcatctgacaaatttcttcaggtgggaaccatgacgcacgttgttattgtcaggaatagttttagttattcccattcgcaacctaacgtgaccaggcgaaaactattgtgcggtcacaaccaaccattaattgcaacaacgctcggcattcttgaaactcaaaaacgtactgacacgtgttagcgcagtacgttttgtaatttatttgtgtaacgcattccgatgagtcaaaaagctggtcatcgcattgaccccactcataatggcagccgtgtgcggcaccatgttttccgagtgcaacgaatatggactgtcgacccctaaccagaacattgtccctggaatctgatgaatcaaataaccaaagtcttccccagtcattgctggttccgtttcaataaagttgacatcatcatcctcctgcatgtacttgataaaatcagcagtgattgcgtcattgttctcaacgggataataaccaccttgattgagcttcaaatcgatattgcagtcataggcgagcgcaatcccctcagtaatcgtccgaacccgccgctgaatatgcatgttcatctcctgcgtcaacgctcggatcgtcccgtcaatctgggcctcaccggcaatcacattgccaatcgtgccagcagtaaagtgacctaatgtcaccacaccactttgaatcgggtccacgttgcgcgctacaatcgtctgcagctgggagactaacgccgcaccagcgacgaccatgtcgtttgcttgatgtgggtaagccgcgtgtccacttttaccacttaagtgtgcgtggatctcacaagttcccgcaaataacgtgcccatccggcaaccgatcgctccagttggtaaattaggattgtcatggaatgcaaaaatctcatctggcatccaatcaccatctagcgcaccactttcgtacaagcgttgcccacccgaggcattttcctcagccggctggaacatgaaaaccatgtcggtcgcaggtcggttctctgcaaagtagcttaggattcctagcgcgactgacatatgaatatcatggccacacgcgtgcatgacacctggatgggtcgatgcaaatggtaagcccgtattttcagtaactggtaacgcatcgatgtcagttcgataaccgattcgataatcatgctttaaaccactgactttcactaaaatcgccgtatccaaagtaggaatggttttgattgtcagccactcttgaggcatcttaccaataatcgacaataaataagcctgtgtttcatgttcttgtaagccgatttccggaatttggtgtaagtgttgataaattggaattagatcggtttcccgtaagaccattgtttatccctccaccattaaagattccgtaattctgccattaattcagtcttgctcttagtcttatcatcaatatctttcaacttacgagcaggaaccccaccgactacggtgttaggagcgacgtcttcaatgacgatcgcacccgcagccacaacggcacccttaccaacatgcacgccttcaagtacggccgcattggcaccgatcagcacgtcgtcatcgatttgaactggtttagccgaaggtggctctaccacgccagctaacacagtaccagcgccaatatgacagttcttaccaacaattgcgcgaccaccaagaatggcacccatgtcaatcatcgagccttcaccgatttcggcaccaatgttgatcaccgcacccatcatgataacggcattatcaccaatcaatacttggtcacgaataatcgcaccgggttcgatccgcgcattgtattgcttcaaatctgccattggtacggctgaattgcgcgcgtcattttctaattcataatcttcgatatttgcagcgttagcctttaagaacggttcaacatccgcccagtcaccgaataataccccagcgttgccactgaagaaagttttgatgcctgctggaacgtttaattggtctaaagcacccttcacgtatacttttacgggtgttttctttttcgcactgccaatgtagttaataattgattgtgcatctaattttgccatcggagaccctccaaaaatttatttagctttttcactagtggaaaaatccttctcaatcatatcatattgtttgccgatttcatgggtcagaaagttaaaactcttcatgaattcacgacgagtgacaattccttgaaaaatttgctgttcatcaacgactggaacaaacggattatcaatcatcaagtgtaacgtctcttcaacgtcatccacatcatgaaccgtcttaacttgtgtctccattacgtcacagacacgtttttgcagtaatatttcagtattcagttgatcaaaacctaacatttgttcagtaatcagtggcaacgatactaaaccttcaaagtgaccaccatgatcaagtactggaattttggaatacttgaccttcgttagtactaaaaacgcgtgatacaaattattatcagtttgaacgttggcaaccacgtccgccggaatcaaataatggtcggcgttacgtgacaataagtcctcaactggttgaattaacatacagcgcctccttcactaagcccatccctttattttaaccgcaaaagcactttgcacagccctaaaaatcagtttttttaccacattttaatcagcaaaatgaaattttagttctggcaccgcttgtagttgccgatcataatattggacgtcgatacctgcggctgacgttgtcacgatggcgtaggtgccaccgatacgtgcaaattcaccacgcggataagtaatactaccaggattaagcacgaccacgccgcctcgtcgttcaacacccagttgatgcgtgtgaccaaagaaagccagcttcgcattgtgcacctcagcattagctaatagatggtccaatcccatgttcacaccgactaagtgaccgtgcgtcatgtagactgtcacctcatcaatagttggattcacttcatttggaatcacggcatcgaaatccatatttccttgaaccgtgaacatctcttgaaaaaccgcgtcatcatgcggtaattcagaatcaccacagtgaaaaaaggcgtcgacctgaccgcggtacttatcaagcaatcgaactaacacgtcacgatcgccatggctatcactcactactaaacatttcatgctttcgcccaccattcatcgaatttagtcatcagttgtcgcaaggctgcaccccgatgactgatttgatttttttgtgctggcgtcaattccgccaaggatttttgaaacttacttgaccaaaataacggatcataaccaaacccattgtcaccacggggggcaatcagaatacggccggctaactcaccgttaacgacaagtttctcaccactgggtttaagggcaaccagggtcgtatgaaaagtcgcggtccgctccgcttcaggaacgccaccaaggttggctaacaacttggcattattcgcagcatcatcatgatcaccagcataccgtgccgagaacactcccggatcgccgtgcaacgccttgaccatcaagccggaatcatccgcaattgccggtaatccggttgcttcgaccacaaccgtcgcctttttagtggcattttcttcaaacgtgataccgttctccttaatttcaggaatatttggaaaatcagccaacgttttgatagtaatatcatacggtgccaacatcgcgctaaactcgcgcgccttattggcattgttagtcgcaatgatcaatgtttgtggtttagtcattcgcttcactccctaaatcaatatgttgtgcgtgaaagtccggttggcccaaccagttccgcgcgattgcttcgaattgatcagccgcccccgtcgtgtagtactcatccggataacgcttagtagaacgatcgttagcaatatccaagtaatcgagtaccgccgagacatcgttcaccgtttcggcaccagaatcaatcaaggtcaccccaggccccatcacattttgaataagtggccgcaataatggatagtgtgtgcagcccaaaacaagcgtatcaacgtcttgtttttttagttgtttcaacgtttccgcaaccacccgcttggcaaccgttgattgatactcattcgattcaaccaacggcacaaactttgggcacgcctgcgaaacgaccgtcgcagtaggatctttggttaagatagcatctcgataagcattactacgaatcgtcccctcagtcgcaatcacaccgattcgattacgatgagaagcttttaacgcagcccgcgaaccaggcgcaatcaccccaataacgggaattgacaactgctgccgcaacgccggcaatgccgctgcggtcgcagtattacaagctatcacgagcattttgatctgctttgctattaagaaatccgccatctgaaaagaaaaagttcgcacttgttcagctggtcgcggaccgtatggcaaacgtgcctgatcaccaataaaataaactgtttcgcgcgggagttgtttcaaagcttgcttgacgacagtcaacccgccaacccccgaatccatgaagccaattgcatgttcatttgccattttaaaatctccgttcactgaattctgaaactttattatggtcttttttgaaattgatttcaagccagaccaattgcgacgaaattgtaaagtttccgttgataaattgaaaaaaaccgacacattagtggaaacggggtataataatgattatacagtggctagagtaccacgattttttgcatggaaaggaattatcatgacgaacgacttttattctcaatttgcgggcaactcgatcaaagcttccatcctcagtgtggaaatcttgcgagatgccttaataccaaagttattgggtgatgacagtagtggcatcctttactgggcgggtaaagacttggcacgccagtttcctgtcgctagtgatgatgatcttgttacctttttcgagcaaaccggctggggtcaccttgtcgtgattacaacgacggatgatctaatcacgtatgaattgactggtgagccggtcgctcggcgtagcgccacgatcaaatcaccagactttatgcttgaaactggctttctagctgagcagtcagcgctccgcaccaactgtgtgagtgaagctaaaattacgttccaaaatcgcatgcgactgcgcatctcagttacgattgatcacaatcaaccaatcgtcaatcacgatcccgcaacaccaatcgaaatcgtgcggcctcaagttgaacttgatgacgaacaacctgaagaagcacagtaaaaaggacggccacgtggtcgcccttttttgcaacgttaaatagttttccttatatagtcattattaacggttgtccccggtcttaaaaaagagcgcaaaaaaacgcgccgttcacttaagaaggcgcgttcgctagcgaaccattaatgaaataatggcccagcttattatagatattgagctaaagtttgttggatctgttccttggaatggtagccaactaaggtatcaaccacttcgccatccttcttaactaataaggttggaatgctcatgataccaaagttgctggccgtttcagggttggcgtcgacatccatcttattgaacgtcaccttgtcacccatctcgtcagctaattgttcgaccactggtgactgcatccggcaaggaccacaccatgtcgcccagaagtcagttaacgttactcctgaagccgtatccgttgtaaaagttttatcagtagttgctgcgaccattataatcggcctcctttaagctttatctgttactaatagtaagtataccagtaaccgggtggaacacaaacaatttgcctgcaatcaaagcgccgatatcgtgcacagccatgaattcgcgtcatcactgatctgcacctggcactcgtcactggttatttgaactgcacctcagtcgcaccattgccgccatgatttggcgcagcaaagtgaaacgacttgacttgccgattagacttgagatagttggtaatgccttctcgtagagcaccagttcccttcccgtgtacgattgtgacggaaggatacccggccaacaacgcagcatcaatatagcgatcaacttgagtcatcgcgtcttcataacgcacaccccgcaggtccaagttcggcgaaacgtgactcgcgtgggcactctgaacagtagcacgcgcgcgttttggctcttctggcttaacgcgttccaagtcaacgtcactaatcttcatcttcaagatgccgagttggacttcccactcgtgtttacccatctgacgcatcaacacaccacgttgaccatacgatttgaccagcacgtcatcaccttcatgaaaatcatgttgggctttggcacgccgtaatacacggtttttcttgagcttaggctgttgctccaatgcattcaacgcgcccttcgcatcaatcaactcgttttctttgacagtcgccgtaccactcgctaattgtttcttacgcaaatcactaatgatagcatcggccttagtcttactttgctcaacaatggtgttcgcctgcactttggcatcttcgatcaactgatctttacgctgttgatacgcattgaattcgctcttcaactgccggtgcaatttttcagaatctgccacttgggttttcagatgcagttgttcatcttcaacctgtttgcgcttcgtcaccaaatccgcaatcattgcgttgaggtcttgactatccgtatccgtcaacgaccgagcttgatcaacaatcgcttgcgggatgcccaaccgctgtgcgatatcgagcgcattacttcgaccaggaatcccgaccaatagccggtatgtcggcttgagtgtttcttcgtcaaactccatactagcattgatcgtatcaggtcggttaaacccatacgccttaagttctgggtagtgagtcgtcgcaacgacttgggttcccttggccccaatggcatccagaattgcgattgccagtgccgcaccttcttgcggatcagtcccggcacccaattcatcaacgagtactaaactgtgagcgtcgatctgcgctaagaaactttcaatattttccatatgggatgagaacgtacttaaattctgttcgatcgactgttcatcaccaatatccgcaaagatctcattataaacgccaacgcgacttccggcttcaacaggaataaataatcctgactgggccatcaattgtagtaatcccagcgtcttcaacgtaatcgtcttcccaccagtgttaggccccgtaatgaccatcgcctgataatcagtacctaaactaatatcattggcaacgactttgcgaggatcaatcagggggtggcgtgcttgccgtagatagacttcatttttgggtgaaacggccggttcagtcgccttcatatcatgcgcataacgcgccttggcattgataaagtcgaaatgtccaagaatcgccgcattattaatgatttcgtcctggtaaggcgcaatcaagttggagagtgcctccaagatacgctgttcttcttgcttttccgcaacttgattttgccgtaaccggtcattcatcgccatgacagcctggggttcgataaagagcgtctgcccactcgctgattgatcatgcacgatgccaccaaaccgactacgattctcggccttgaccgggataacgtaacggtcgtttctaatcgtgatgattgggtcgcttaaatacttggcatcatggtcacgggtataatgacccatttggttacgaatctccgtttcagtacgacggatattgctccgaatccggctcagttctggtgacgcctcatccgtgatatgaccgtcaccttcaatggcagtagcgaggcgcttcgtcacatctggtaaagtaactaattctgcaacttcatcaaacaggtgtcgaatatcattctcaggggcatcttctagcaactcggcaaaaaagcgcgtgattgcgcgcgttgtccgtaacacccgcccaacttgcccgagttcactcccattcagggtcgcaccgatagctaaccgtttcatatgcggttttatatccgctaaacgagcgaccggaatgccaccctttaaacgatacacttctgccccatcgttggtttcatctaaggcccgttgaatatccgcaacgctggtcattgggtgtagttcattgagtgcttgttggcccgttgccgagactaagtatggtgctaattgttgttttacttgttggtactctaacgtattcaatactttggaattcactgatatccctccgaagttccaatgaattacgaaaagccgcaaaaaaacggacaatgcaattacttgtcggcatcatccgtttgcattttcaataattcagcttgtttgtcaacctgatctgaaatcgcattgaatgcgagcaacgtcgcaatctccgtatcagacaaatcgggggctaatttttttaattgtgccacttgctcattcatcatccgcgtcaccgtttgcatgtgacggtcagatgccgtgccaatgatcgtgtaagtacgaccatcaatttccgctttaaagcggcgcttgttagcagtcatcaacatcccgcttcctttcaataacaattaatattctagcatggttatcacaattatgcgacagttagaaccgtctcataatttctaaaaaagcccgcggacatacgcccacgagcttaatctactttcgactattgcatgccaccgtcatcggctaagaaggtattcaaaacttgctcaaccatatcccattcgtcgtccgactcgatcagttgtaattcgccattgtcgccatcttcaggattaaagatgtaggcttgaatatcaacttcatcatcggccgcagcatcagctggatataataaaatataggagtgaccgaaatcttctgaatcaaacgtgaacaaaatattaaataaggtttcgttaccttcgtcatcaactaatgtgatcacatcattgtctttacgatcttggttttggctcatgttagttcctcgctattcttgtgtgagtttgccgtggcgatccaagtagttttgcaagattaaacttgcagctagcttgtcgatcacctttttgcgtttcttacgtgaggtgttagcttcttcaaccaacatccgttcagcttcaacggtcgtcagacgttcatcttcaaagtctaccggcaaatgaaaccgggctgtcagtaactcgccgtaatgttgcgccgcctcagcccgtggtcccaaggtattattcatattctttggtagccctaggacaaagcccccagcatccaattcttcaacgagttcagcaacccggtcgattccgaattcctcagcatcctcattgattcgaataatttcaacgccctgcgccgtccatccaaaagcatcactaatggcaacgccaacagttctggaacctacatctaaccccatcaacttcatgcatcaacatccttatctgccttcaagtaagacttgacaagttcctcgataatctcatcgcgctgatgcttccgaattaagttccgagcatcctttaagcgcgggatatacgccggatcaccggatagtaagtaacccacgatttgattaatcggattgtagcccttttcttgtaacgcttcataaactgtcgttaacgtgtcgtggacatccttaacgctgtcattatcgaagtcaaagtacattgttttgtctaatgaactcatatcaagcacctcccgctagtttccggttctaatctattttactaaatgcccatatgaagtacaatcaatccactttgatgtaacacattcgtaataataacccggagaatgcagacgttttctgcaaatccatcccgatttacactgttttttcatatactgacatacccctgtttcgaatgttcgaatagttgaaattcaaaacaggcacaccctttgtaacccaatcttctacgagttaagccggtcacaaggtgccataacattaaaaaatcagtaccgttagaacggtctcgtcctaacagcactgatttaattgttattttgatagctttaacatagctaaccaacataaaaaacaggatgtgcaaccaaagcaatcagtcttattgttcggcaagccactcatgcgcagctttcagcgccgctggtagtccagcaggcttcttcccgccagcttgggctaaggttgggcggccaccgccgccaccaccaacttttggtgcaatggctttgatcaagtcaccagctttgatacctgccttgaccttgtcatcactaacagcaactaataagttgaccttttcgccaatgactgttccaagtaccagtacgtcagaatactgcttggtcttccaagtatcggccaattgacggagttgatccatgccagagacttcaatttgttgggcgatcaacgtcgtaccgttcacatcgtcaacttgatcaaagactgccccagcctgctgtttggctaagcgactttcgaggctggcccggttctgttgttccgctttgagatcggcttgtaactgactaaccttggctggcgtatcagctaacttcggtgccttgacttgagcagcaacttgcttcaaggtttgttcttcgccggcaagcagttcgaaagcttccttcgaagtaacggcttcaatccgccgcgttccagcgccaatccctgtttcggaaacaatcttaaatagccccaattcactactgttcttaacgtgggtcccaccatcgaattcgatagaataatcaccaattgaaacaacccgcacaattttgccatacttttcagtgaaaaccgcaattgcgcccatcttgtgaccagtttcttggtccgtttgaatagcactgactggtaacgctgcccagatcttatcattgacgatttgttcaactttagctaactcttcgtcagtcacttgaccaaagtgagtaaagtcaaaccgtaaataatcaggttctacaagtgaaccagcttgtttcgtatgttcaccgagaacgtcacgaagcgcctggtctaacaagtgggtggcggtatgattcttttcgactttgttgtggaatgccaagtcaacgttcagcgtataagtcgcgtcttttcgcattggtttcaacacttcaacggtgtgtaaatgctgcttgttgggtgcattttgtacgtcagtcactttagccaccatttcaccggcatcatctaagatcacaccacggtcggcaacctgaccacccatttcagcataaaacggtgtcttgctgaaaatcatctcagcttgaccactgtcgacgtgatcaaccagggtctcgtcaacaataatgtcgttcaaagtcccctgcacattcgttaattcgtcatatcccacgtattcacttggcgttttgatgtcgatcaagagactccgttggacgcccatggacttggcactgctacgtgcattgcgtgcgcggtcacgttgagccttcatttcaacttcaaaaccagcttcgtcgacatctaaatcttcgtcgccagcgtattccttagttagttcgaacgggaagccataagtgtcatataacttaaatgcatccttaccagctagtgtatcgtgaccagcctgcttggtttccgcgatcaagttatttaacagattcaacccatcattcaaggtctcattgaagcgactttcttctgaagccacgatcttttcgatatacgcactatttttgagcacgtcgggatagtgtgaagccatgatcttgccaacaatcggtactaattggtccaagaaagcttctttcaaacctaatttttgaccatgtaggattgcccgccgaatcaaccgccgaatgacatagccacgaccttcgttggaaggtaaggccccgtcactaatagcaaacgtaatggcccgagcgtgatcggcaatcactttgaaggacacatcgtcctgggcgttatcaccgtagtgcttgccatcacttaattcttccgtcttatgaataattgggaggaataggtcagtttcaaaattggttttcgcattttgaaagaccgaaacgacccgttctagccccatccccgtatcaatattcttacgcgggagtggttcgtaagtaccttcaggagtgtggttaaattgcgaaaagacaatgttccaaacttccaagtaacgttcattttcgccaccaggatagttttccgggtcatcatcagctaaattattgaaagcttcgccacgatcataaaaaatttctgaatcggggccagatgggccttgaccaatgtcccagaagttatcttcgactttaatgatgtggtctggtttcacgccagttgcttcccagaatttcacggcatccgtgtccttgggataaacagtcatgtataacttgtcaggatcccagccaaaccattttggtgaggtcaagagttcccaggcccaactgattgcttcttttttgaagtagtcaccaactgagaaattaccaagcatttcaaacaacgtgtggtgccgcgccgtccgcccaacattctcaatatcattcgtccgaatactcttctgtgaactcgtcatgcgggggttatccggcacaacggagccatcaaagtacttcttcatcgttgcaacaccggagttgatccataataacgttgggtcatccacgggaactagtgatgcactagggacaatcgtatgacctttttcatgaaaaaagtccaagtacatttgccgaatttcactactacttaattttttcatttaattctggcatcctctctatcattcttaatttaaggcaaaaaaacaccgttgctagcaaagacgctgttaacgcggtaccactctgcttgcaacgatgtgttcgtttacctcttaagctcattaacgctgagacacggactagtttgctagtcattacttctaggtagcatctaccccacaccgcactttttccagcaaccaaagtgtttcttgaccgatatgtgagatagatatgtccttactttgcaaagtatagaaaacttgcggcgacttgtcaatacaccactcagttattttgcattaatctatccggatgcacgtcaattaagacttacgatccttgcgttccttgcgggcagccgctcgttgttcgatgcggcggtccatccgcgccttatcgctgatctttttacgaatgcggcgtttgtaacccggcttgatctttttcttggactttttgacgtaaccaatcaaggttgggtccagtttttcctgttttggcccccgtttagcccgacgattacggtcatatgaatccacaatctcaccatcacgaatcgccttcggtttgaacttgatccccattgcttcaactgcactgaccttggcttcttcgcctgggctatataacgtaatcgcagtccccgccattccattccggccggtccggccaacacggtgaatgaagaattctaagtcattcggaatatcatcattgatgacgtgtgaaacaccttcaatatcaatcccacgggcagctagatcagtggcaacaacaaattgatacttcaattgttggacgtcgcgcataacccgctttcgttcacgtggttggatatctccatggatcattgcgaccgttaaaccttgttggcgcaaataatgggtcaactcttgaactcgttccttcgtgttagcaaaaatcaacacgagatacggttcaccaatcgtcagcaagcgataaataatactgtttttatcgtgactcttggtggaaatcagccagttatcaatagtcggactaatcacagattctactggaatttcttccataactggattgttcatgtacttgcgcaaaaatggcgttaatttttgtggcatcgtggctgagaacaccaacatttgtaaatcagcaggcattcggccagcaatctggtcaaccacgttcaaaaagcccaagtctagcgtcatatcggcttcatcaactactagctgagtcgcacgatgcacatcgagtgcctgggagcgcattaagtccagaatccgtcctggggtcccaataatcaactgtggttggtgccgatttagcttttcaatctgttcctgcttatcagtcccaccgacatagagtccaatgtgaatggctttcgggctgtgttggatcaactgtttagcagcagtctgaatctgataagctaattcacggctgggcgttgtgataactgcctgcacgtaacgttcatcagcattcagttgattgatcattggcagtaaaaacgtatgcgtcttaccactcccagttgctgactgaccgatgacgctgcggccagcagcaatcactggaatcaacttttcctgtaccgcagtcggtttgcggaaattgatgtcagtcagtgcctgcatcaagaacggctgcaatttaaaatcttcaaaacttgcggtcatatttaaacctctttctcataatggctagcgacttggtcgagttctcgcactaccgtttcaatttcttgttggtctttagccttggcaccgctcgctaatgcgtggcccccaccatcatggttcttggccacaccgttgattgacggtccctttgaacgtaaccgaatacggaagtcaccttccttttgttgaacaaaaatcgcccagcacttaaccgtatcaatacgcccaggtaatgggacaaccccagcagtactagcatcaccgattgcaaatgaatcgagaatcgcattcgttaaaataacgtaagctgcacccgaatccaactgtgtcagatgttcataaacgtaggccgacaaccgtgcgactggtaacgtgatggtatcttcaatacgattaacagcttcagcatccgcaccggcttccattaaggccgctgctgctcgcatggtactaggcttggtcgcagagtatagaaagcgaccggtgtccccaacgatgccggcatacaacaaccgagcggcgttagccgttagcgttaactccgccgcaaggggtgcgtaccaattataaatcatctcactcgtactggaagcatcaacgtcgacccactgtgggtcaccgaaagcgtcatcgtttgggtgatgatcgattttaacaattgtcttaccttgattccaaagttcaccatcaattcggggctgattagcggtatcaagaattaatactagtgcgtcttgatagtccgcttcggtaacctcatccatttgtcctaaccagtcaaaaccatggtactgttttccaggtgtcaatacccgcttcgcaggaaagctagctttaatgatagctgctaaccctaactggcttccgatggcgtctgggtcaggtcgctgatgacgatgaatgatgattgtttttgcttgtttaattaagtcaaaaattgctgtttggacggtcataaatgaaccttcttactctcataatttactggtggcgattaaactgtcacagtactccagtataccgaagaatccgcgtcgcgccaaataaattaattatcatttggataaagtggtaacgttaagttctcaaacgccagtggtgccaagccagttagcgtgatccctaacaggcggatgccagagttaaaatgatcatcgaccacctcttcaaaaatctcttcggcgtactgctcaaacaaggccgcgtcattaggtatgaattcaccgaacgttcgccgcttggtaattgtgacaaagtcaccgtaacgcaacttgagaacgagtgttttaccgtggcgctgatgcgattgcatgctagctgctaccaacttagcgatggccttcaagtgcgtattaacttccgtcgtcgattggagaaacggtccaaacgtccgctctttgccgattgatttccgttcacgtaaatactcgactggccgatcatcactgccgcgcactcgccggtataaaatatagcccaacttgccaaattgtttgattaggtctaattcagactgtgcgtataaatcctgtccagtcttgattcctaaatcgtgcattttaggtaccgtctttttaccgacaccccgaaatttctcgatgggttcacgtaataaaaatggttctgcatcctgtggtaatacgatcgtcacacccgctggttttcgataatctgatgctagtttggcaatgaatttgttgtaggagattcccgttgaacaagttaaatgtgtttgatgccaaatttcttgttgtaatcggtgcgccagttcgaccgcactatggatgtgtttcttattcgtagtcacatccaagtaagcctcatcaaaggcaattggctcaatcatctctgtatactcatggaaaatacgatgaatctgcgccgaaacttcgcggtacaacggaaagttgggcgtcttaaatactgctgttgggcagagttctaatgctttagcagctggcatcgccgagtgaacaccaaattggcgggcaacatagttagccgtcgtcacaacgcctcgcccacctgtctgccgaggatcatgcgcgatcactaacggctgcgccttgtaggctggatgctcccgctcttcgatcgacgcataaaacgcgtccatgtccacatgaataattttccgactcgtatccacccgaataggcgcttcaacaattgactgtgccatccgccgcccctccaatccttagtactttcattatacacgaacatacgttcaaaagcgcgtttcaagaccaaaaaataagcaaaaaaaataagcggtcatcagtaatgatcgaccacttatggtgtaaacctattttgcttcagaatcagcattatcgtcggcggctgagcttgccgattcaacttcagaagtagcagctgattcagccgctgccccagattctggtgcaactgtcttagcttgtgcatcttcggctggagaaatcttagcaacagcgttcaaatcaaaaaccaagtagatgccatcacagtctaaagtaactgttttttcggtttcgttaacttcatcaacgaccccgtgcaagcgaccaattgtcgtaaccttgtcaccacgtttgattttgcttaacatttgttgatgttgttgttgttgtttccgttgtggacggatcatgaagaagtataagaatgcgaacatgaccacgataaacagaattgatgccatttgacccatttaatatcgctcctactctaattaaaagtttgactatctttaactttaacaaattacagtctgaaataccagtagcactaaaagtttttcgggtttttatcgttaaaaccgtacatttcaaagaagttctggcgaaactccagtaaattatcatccataatggcttgacgaacttgcttcattaagtgtaacaagaaatataagttatgataactcgtcaaacgcaaaccaaacgtctcgtccgccttaatcaaatgacgaatataagcacgcgtgaaattacgacaggtataacaatcacaattatcatctaacggggtgaaatcgtgagcgtaggccgcatttttgacaactaaacgcccatgggacgtcatgcaagtgccattacgggcaatccgagtcggtaagacacagtcaaacatatcgaccccacgaattgcaccgtcgatcaaggcatccgcagagccaactcccatcaagtaacggggtttattttctggcaatagtggcgtcgtgaagtctaaaacatgattcatctcagccttcgattcacccactgataagcccccaatcgagtagcctggaaagtccaagctaacaagatctttggcactctgttcacgcaagtctttaaagcccgcaccttgaacaatcccaaataagccttggtaatcagggtgttgatgaaccttcaacccccgctctgcccagcgacttgtccgggcaactgacttgctaacatagtcgtaactttcaaagaatggtgggcattcatccaaactcatcatgatatctgggccaagatcattttcgatttgaatagccttttcaggagataagaacatctttgagccattcagatgattcttaaagtggaccccttcttccgtaatatcacggtttttagccagggaaaagacttgaaacccacctgaatccgtcaagattccctttttccaattcataaactgatgtaacccgccagcttctttcacgatttgctcgcctggccgtaaccacagatggtacgtattcgataagataacacccgcacccatcgcgtctaattcttcgggtgccagtgacttaacactggcttgcgtcccaacgggcataaacatcggtgttggaaaggtcccgtgtggcgtaatcaattcgccaaggcgggctcctgtgtgtttttctttcttaattaatcggtatttaattgccggttccatatctgttcctccgtattaaaatgttgctaaactcaaataatgatagcacgaaatccagccgtgaaccagtcgcggcaattggcgtgggcacccacgtggctttagtcagtctgttaacaaagcgttcaaacgtcaaatagtcgcctcaagaatgcattttaacttcttgaagcgactattgacaatctttattatctccagagctaaaacgtcagcttgaaattagcgatacgcctcgtataatacggcattttaatattcaaccgtcatccgtttcaaaataagcgatctcgtttaaagccagttatactagtgaataaacatcgcatcgccaaaactgaagaagcgatacttttcatcaatcgcatgttgataagccttcaaaatcatatcacggcccgtaaaggcagccactaacatgaccaaggtcgacttcggtaaatgaaagttcgtgatgaacgcatcaacgactttccattgataaccaggtttgataaagatatccgtccaacccgaatccggcttgatttcaccatcaaacttactaccaatggtctctaacgtccggattgacgttgtcccggttgcaatgatgcgcccaccattttgccgtacttcattcaacgtcttagcagcatcttcgtccaatcgataaaattcactgtgcatcttatgatcatcgatattatcttcttcaactggccggaacgtccctagtccgacatgcagcgtcaagtaaaccaacttaatacccttgtcttgaactttttgtaagagttccttcgtccagtgtaaaccagctgttggcgcagctgccgagccattttccttggcataaacagtctgataacggtctggatcatcgagtttttctttaatatatggtggcaatggcgtttcacccaggctctccaaaatttccatgaagatcccatcgtaatggaactcgatcattcgaatgccatcttccttttcggccgttacggtcgccgtcaacttaccatcgccaaatgaaatcacggtaccgaccttggcacgcttggcaggtttcatgagtgtctcccattcatcaccttccgtattatgcaataataggacttcagcgtgaccaccagtttcaggtttaacaccatacaaacgagctggcataacgcgggaattattcataacgaccgcatcgcctggattgagttgatcaataatatcgtagaaatgcttatcttgcatttcgcccgtttggcgatccaattccaacaaccgtgaactatcccgttttttgattggtgtctgggcaatcagttcatgtggtaaatcataatcaaaatcttcaagtgttaaactcatgttgtgacctcttatctttatttattttctgggtatgggaatcccaaatgctgataacctttaattgtaacaacgcgtccacgttgtgttcgcttcaagaacccaatctggagtaagtacggttcgaccacttccgcgattgtatccgtttcttcaccaatattggccgcaatcgtagcaagcccgaccggacccccgtcataatactctagcatcgttcgtaagagcttattgtcagtctcatccaagccggcatcatctacgcgtaaatatgtcagtgatcgcgccacgatggcctcatcaatggcatcttgatccgccacttctgcaaaatcacgaattcgcttgaacaagcgattagcaatgcggggcgttccccgtgagcgacgcgcaatttcgtgggcacccgatggtttgatactcgtttgaaaaatatctgcagtccgcttaacgatatcttccaaatcagcaacttcatagtacgccatatgttcgacgattccaaatcggtcacgtaacggagctgacagcataccagctcgggtggtcgcgccaatcagcgtaaacggcggcagtggaaagtgtacgggatgggcggttggcccctgtccgaccacgatatcgacaaaaaaatcttccatggccgaatacaacatttcttcaacgattttcggtaaccggtgaatttcgtcaataaataagatatcacccggctccagttcattcaagagcgcaaccaaatcacctggcttttcgattgcagggccactggtcgtgcggatattgacctgcatctcgttggcgattaccatcgctagcgtggtcttccctaatcccggtggaccatacagcaaaacgtgatccaaggattcctcacgcttgcgggccgcttcaatatacactcctaattcgtgcttgacccgggcctgaccaatatactgggctaacgtttgcggacggagcgatttttctaatgacgcctcttcgtcatcggctttgtcaccggataataacttgtcatcgtccatttagttacccctcccatctacttcttcatcaatagtcgtagtccttcactcaacaaggtgttcgtatcggccccttgtgtctgactaaacgtctccaacttcttagtgaccttcttgacatccgctttcgaatagccaagagcttccagagccgccaacgcgtccgctaacgcgccatcaacagcaggagcatccacatcgagcgcagtttgaccagtcacatcaacgtttagatcgtttaatttacctttcaagtccagcacgatttgctgagctgtcttcttgcccacgccaggaaaactcgtcagataagtcgcattctcttgattgatggcttggatcagacctgcatggtcgttgttggccaaaatcgcgagggccgacttcggaccaattcccgaaaccccgagcaacttttcgaacaacgccttctcgtcagcatcaaaaaagccaaataggctcatgccattttcgctgacggcttgatggatatacatcttaactgctgttgggcccacctggtaacggtatggattagccgttagcactttataaccaatgccgctgacctcaatcaccacataaccgggggttacatcggtcacttgaccgagaaaatattcgtacaccgaaaaaactcctttaaataaaacgtatgtttgcttgctaaattgtaccacattttcacagtggcttaacactggtgcaccgataaaaaccaaattttaatgttaaatcaatttcacctcgattgacggatttcgttgcaagaaatgcttgccgccacgttaacgtcatgctatgctcaaagtcctagggaggtctcgctatgcaactcaaaccgtttaaagcggtgttaccaaccacaactggtcaaactaaaattcaaacagctgcgaccaattgggacagccaggatacaatgacgacaaccgaagccagctattactggtacgaactcacactcaacggtgttcaccagtggcgcttaattggcagctggccggtggatcaaaccgtgacgaccatggttcccggcacgatcaacacagtcctttacccacagcagcccgttatcgagatgttgattgacgactgggtcggtcattttgccccggtcgtcgaggtgacggataccgcgcacgtcacacatcgactctggcagattactgagtctgaggtcaataccgacatcacaacggccatggcacccgttatcccgcagaaaacgtggttgacaacggtcagcacgccactcgtcatgttagtctcaaccagtgaatggcaaaaattagtcactgcaccggtcattcccgaacaattaattgcgttagcgacatctcataattaaccagtcgtggctgttaattgtgaatttcgctatggcatacattcgtttgtgttccatctaacgttaaataggcttcttaggaatcaaagttaattcctaagaagcctattttaataccgatttactcaattaagattgtctgacacgtttgtgaagcccccaccagcaggcaatcagtatgctaatcacaccaccaataatactcgaccatatgccgatttttagtcctggtgtgtgatacgtcaaccgaatctggtgccggccggctgtcaacttggcccccacaaaccctttgttgacgacttgggtcctaacggtttgaccgtcaactcgtagctgccaaccagtcgaatacggaattgacgttgttaacacggttgctgtcttagtcagcgtggttcccgtaatctggttgttcgtcacttgttgatgcttcaacccactcgtctgtagttgccgcgtccgttgacgataagtcttcccaagcggtacagcgatcagtttagcggacttaaaatgcaaactacgaatgctcgtaaagttcaacgtaatcagcttacgcgcgtacttgctataccctaagttgattactgctgatgtccggggctcataatctgacatattcgtggtacccaactgactaaagctcgtcaagttatccgttgtctgagcagttaaagaatacccactagcgctcaaattgcccttcagaccatcgcgaacatcatctagataatcgactttggtatacggacgggccgtgaacacgttggtattttgactcgttgtcaaggcgtgcttgattgaggaacgccgataactgatgccatctagcacaagatagagttccgtatttcgatacttcttagggtgttgaatggtcaattggtacggtatctggtgcccctgcacatcactgaccatgctcgttaactcgtcggcattgttttcctgatttttctggactaacttttgattagctgcaatcaagttcaacacgcggtttgacggtgtcgtcaggccagttgccggcgtcaaactttctcgttgttccggcgttaatgtgatcgtatctgccggtaacttagtcaacgcgttgttcgacgctcccgttgcatgttgattgcggtaaataatcaccttgtccaacgtatccaaaacattcgtcgtatccgcttgaaccgtataagcgacgttttttccggtaacggttggcttgacagtcttaacaccactaacctgctgcgtagtgaccgcaccttgtaacaaggcttgctcgcggtcaactgcgttcaagcgattaaattggcgttgactaatctgatgctgctgtgtataaactaacggcaacgcattcttggattttaacaagatcgtgccggtatgattactcatgccataaataaacttgtccgcaaaaatctttggttcgccagttttcatcttaacaacctcatatccggctggtaaggcttgtttcttcaactggtcctcacgtgcaaataaatatttaacacctaataagttatacatcgtcgtccgaccgtccaacgaaccgagtggcgagttcatcgcatactctgagttgcctaaggcctgactaaatgcccccacgtaaccattttgaactgaaaaatacgatccaaccgtgtgagttcctaacaccatcggcacatcactctcagccgaacgcatcgtatagtagttgggtgccaaagccgttcgataaaattggctagtcgtggttaaacttttttgcgcgccatcaaaataatttttgacccatttcattgccgcgccctgccgcaactgctcagtactattagaattagtattgatactaaaccagcccagtccgttattcgccaggttcagcgtgacaattcccagtaataacacataaaattgccgattggtcaattttaaggattgtttggccagcaggaccccaattaacgctaacaagataagatatgtcgcaatatcatgtttgcggatattgagatagaatccattgatcagccaaataatgacaagcagaccgccactaataccagccaaccattttaaatcagccgctgtcagagcagtgacttggtccataaatgccatcgtcgcataagcaaacacgagggttgccatcaacaaccatcgattagaaggtgttgaaaaaacgttgaatacggccgcaaattgaggcaacaaaatacccaacatcatcacgaccagtacccaattaagcacccaatagcgtctgaaatgacgtagtgtataaataattgcaataaagctaatgctactcagcccgagggtcacccagtattggacactgccaccattggtcaacagtcgattgggtaaattaacgtaataattgatgggataactcgtcaagccattcgcaaagttaaaactcgcacgcgttgccgtcaacatcgcgagcagcgtgggcactagtaagatgcctgccatcgtgacaccaagaccaactgccactagtaaccgccaaaataactgtccaaacgaccgcatcgttaaatggtcacgacgacgtgaccagaaacgcaccaaagcatagactaaaccgcccaatgcgagtaagtaagcaaaatagaagttactcaaaattacaacggcggtaatcagactgagtggtaaccaatgtcggcctcgtaagacccgttcaatcgcccaacacagtagcggaaaccaaatcattggtaacaagaaaaacgggtggtgcatcccaacatagaacgtatacgcggtaaacgtatacgtcaaagctccaatcaattgactgatacgtttgaacttgaactgccgactgaaacctagaaaagcaagtccaacgaagtacaatcgcagcaagatcaacgcttggtaggcccattccaaatgagcgcgcgaaacaaacgccactaaataattaaacggatcaccgaccacgtagtaggaaaaagtcgtcagttgatcggcccccaagccgagattccatgaccaactgaataattgttgtgggtggtgctgtaagatccgctgaaattccaataaaatcgggaagtgttgggcgatgccatccacttcccaaatcaatgtccggccggctaagaaaagcccactgtaagtaatcgtcgcaataaccacaaacatcgccgtataccagacgactagtggtatcttccgtactgtcttcaaatcaggtgcccctatcttgtaattacgtcgacaacgcaatccccatattttgccatctcaaacaatgtttctattttaccatgaacaatttcgtctcgtgatgttcagtttgaatcttaataaattcgtgattcacagctgtcccatcaacaactaacgccaatcccagttatctaaagtttcaatcttagtagtcgccggataactcccaaacaactgtactaaaggttgtaagccactcacagcattatcacgttgtaagttgatcgcagcgattgccgcttgatcatgacggttaggatcgagctcaaaaacagcaacttgctcatataaatttagcgtaatcaatttggcgtcccgcgcacttggatgcgcatttaattcccacagcgtcttgcgcccggccacgaacgtgggcgtggcctctggtaaatctgccaaaaaacaatatgccgaataaacctggcgataataaagtttggtcatatccaaaacaatcaactcccaatcatgttgagtggtccaagcacccgatacgcgctcaccactcattttaatcaatgatagctaactatttaaaccaattcaatctgaaattttacaactcaaattagtgtcacaaacgccacttccccaatcttaaagttgttttttagaccgcaatactggcgacaataaaagtgaggctgtgacataagtctctagaaacaaagcaggtctggaaaaatcttcgaatttttccagacctgcttttgatataatagaaaaccaacgattaagaacagtcaaatcgagaaaatccaaaagcagttaagagagcaacaagataaggacgatcaataccgaaaagaaaatatcgggcattatcaaccactgaactacaagccagttagtccagactattacttaaagacggcctttagtaacgcaatcatgaccgccctatatgcccgtgatgaagattaccaacggcaaaaacaggcgcaaggtttaaaggagactgagtgggaaatgacgaaaaagcaccggcaacaccaaactcgaaaccggcatgaagatggggggatgcacttgtaatcaaaatgtaaaattgaatggtatcaatgcacctatttatttgctaaactaaaaataaaataaagaaaggagaatccgcatgtggcaaacaaacaaaaatggcatagtctagcacaagcaagtcgtgaattaggacatgggcgcaactatgttagtgcttggttgagcagacatagagaagaattcccagaagaattaatgcttggttctgggaaaagcaagttaatatctgatgaaggcatagagtggattaagaagcacataaaaaaagagggcgtcctcgtcagcagtagagttgctaacggggatcagcacctagaaccgcaacttctaggtgtcaccctcctaacaatccattttaccgggcgggctgggggaaagctagttgtttaatatttctagcccagcaaaccacataaggaggtgactcaatgaaagtagaaagctggcaaggcattaatggcaagctagttcatgatgatcaaaaggcgattgtggttgataatgaccaagcattaaccgatcaaaaacagctacaagcaattttagatcaagacggccagccaatcgacgaagctcgccgagccatgattaagaagatggttaaacgtcagctaaaaacgccgccattaaaacttaggggctggtttaatcgccatcaagacagtcaaaatgctaaaaagtccgaaaaattggtgagtgacaaaccgacccatcaatataagcagatcagaaatgaaatgaccttttttggtgagagtttcctagaaggtttcttaggcttctatggcttagaagttgataacgccttagtccgttatgaacataacttgcatgtcctagagacccaagagttaggccagtcagaaaaagagtattacttagccacgagtgaaaatggccacgtcagattagccaccgacccattaccaagccagcaaattgccgaggaacaattgaacaagttctatcagcgtgagccagaagaaacgcaggcagaacaaattcaattacgaacatcagaagactataggaaggaggaataacatgtcaaaatacagaaaaatgaaagcgctagcaactactggagccaccacaatttacttgggcttgatgaacgcccaagttgtctttgccgcagacggtggcgaagttaaaagtaagctcacccaagctgggaagacgattcaaggtattttaaccgggttggtcgttttagtcgggatttgtgtcgcgctatttattattatcaaaagaatgcctgacgcagacgatccgcgagagaaatcagaggtttaccacgcggttggtcgagtagctggtttagttgccttggcggcggccattatctggctactaccttgggtttacagcctattcacttaatttaaaaaggagcctgccaaatgaagaaaggaaaagaatttatcttcccagagaacgtagataaagattacgggatctggaaagactacaccttgaaggattttggctatgcggcgctggtaggactagtgggcttaatttttattgcaatcccaccctatggtctgatcttagtcctgataaaaatagtgattgttgtcttagccatgacgattgtcatggctattttaacaattcggccagttgcggcgcggaagaatattaaagtgcgggatagctttaagctgaaacgccgctatgccaatggtcagaagctgttctatttaaaaccgaagaagcgaggtgaactaaatgcgtttgaaaaagagcaaaaccgccaataaatcagtaaagctcgattgggattaccaaccgcctaaaatcaatggtggcaaagagaccattgatgacatgagcttggtggtgggtatgtatggtaactatgaagttaccaaaacaggtaatctcgttggcattttggaagttagcgggatcaaccttgatttacttaatgaaaccgaacaacaggacgtttttgaggactatggcgcctttctcatgagtaccttaggtgaaggcgttgatgacaccttacagttcttagagccgacaattcccgtcaatatgacagcttatctcaatggtctcaaacggcggtatctcgccttacaaaaaggccacccggagcaacagttcaaagtccagctcatagccagttacttggatcactttactaaagtccaagaatccaaaaacatgacaactaagcaacatctgctaatcgttaaggtaccgattaaagacaagagcgttaaaagcttaaaattagccgtcactcatttagacgaaaagatcgaacaggttaaacgagacattgaaaatgcgttaacggattttgatgtgacggccaaagttttgactagtcaagaagtccaagagattttaaagaacttgatcaattttaatggatagggggaaacaggatgagttttggtgataaggtcattgatttatttatgccaactaaaaaagaaagacatcaaggcaacagcgaccaaacgggtagtaagcccaaaccggaggttgaggattttaccaagctgattgatcgcgatagcttgcattcactatttccgttcagctgggaacagtaccccacctacgtccagtcgggcgagaattttattcgggtgttagcgatcgctgactatcccaagcgggtgtatggcaactggttatcagaattaaagcgtaaaaaaggcgttatcgatattgtgcaatatatcgacagcgctagtaataattcaatgattacctattacaagaagacgattcaaaataaggaagcgcagaagttaaatacgttcgacccgtataaaaagaagattctgcaaaattatattgattcagccaacatgcaactagataaatacctcgataattctaccacatttgtgtaccaacatatgctgatttatctgcgggccaacaatttagcagacttagatgacttaaccgaaagcgttaagaatacgttgattaaactacaaatgaagcccttagtgcccgttaaagcgactttccaagcattttggtcaaccatgccaattaacgagaacctcatgggggattacacctataaagagagtaataccgaagttgccagcagtatgtttccttttgatgacgctgaaattctggacttaaaaccgagaagcgatattgaaggagttaacaaagataccaacagcttaattgccgtagatatgttggatcgcaacaagatcctaaatcaaaatcaagtgattatcgggacctcgggggtcggcaagaccacctatatgatccaaaaaatcctacgctacgccattcaagactatcaactctacattattgatccagaaaatgaatataccaaaattgtcgaagccctaggtggggcagtcttgcacctaacttctaatgctaagtacaaaattaacccgctacaaatcttttccgaagaaatcttaagcgccgatgaagcggtcacaaaccttgatttactagttaaagataaaatccagcgattaaaggggttctttgaagttcttaaaactgggattacccaagttgaactggcaatccttgatgatgtcgttaaacaagcctacgtcaacagtggcgttttgaaatatagccgcttaaaagaaattaaagacgatcagtggccgaccttatccaatgtttatgacgagttggaaaaattggcagataaggacgccgacaaattcaatcgggtcaaagacttctactacatcttaggcagttatacccatggttctaacagtttatttgacggccataccaacgttaacttaaaagggaaaatcatttcctttgatttaaaaccgctacaaagtgagcaggaagtccaatcagccgcctatctgaatactttccagtatctatgggacgaaattaccaaagatcggcatagccgcaagaaattgtttgtcgatgaatttcatttcttgaccttgcacaaagccgccgccacctttttccaccaagcctacaagcggtttagaaagtataatgctggggcgattgccggaacgcagcaaattcaagatgtgattgaaggaacaacagatactgggcagaacattggggaagccattattgggaactcctataccaaagtgttctttggccttgacggtaaaggcgttgatgatgtgattaccaaattgcgtatgacgttctcggataaagaaaagaagctactagaacgtcgtagacaaggcgaagccctgatgatctatggtagccaacgtgcctttatgcgcgtcgagttgaccgaagaagaattgcggttaattgatcccgaagcttaccaggaaaaatataaccgtgagaccgccaaccaaccggattatcaaaagcgcgtggtgttgacgccaagtgaaattgacgctttgaccaccaccgaagaggaaggggggactttaaatgagtaaatcaaaccaactattaaatatcgaggttgggacattcaaacggcaaggaaacaagttgatcctagagcttaatcacaatcaatttcgatatgaccagttgagtgagctaaacgaattaaagcaagctgatgccaatttcttgcagttggttaacgtggttgagcaagaccaaaaggtcgttttaacttataccttgccagataaggtcagatcattaaaggaattaccacatgaaaataaagcaatccggtcagcgattgccaaggaaatcatggcgcaacatgtggttaacgatagccagtatcacgttgcgttgaacccagctaacctgtggtattacccaatgcaacatgtttggtacgcctatcgcgccaatgaactcatgccttatgatgacaagcacagcaatttagctaaatacaaagcgctgattctattttgtttgacggggacaccctatgaacggctactaagcaatcctaaagaagccctagctaaacacccggacgactatttacaacaagtagctaaagctacgtcgttaaatgagttaacggaagtggttaacggcattgaggactttgtgagctatcacgaatggcaggaagttgaaacagcccagcagaaaaccaaacaacgtttatggttgagcgtggccggagtggcgattgtggccgttttggccgtcggcttagtccataaaagtgacgaaagaaagtatcaaagcttagctaaccagaaccaagcccaggtcacgcgattaaaatatagcggccaaattcaaactgctttaaatgatcggaagtggtcggaagcgcaaaaagatatgcaacgggccggctaccctgcaactaagcaagtcagtgtctttttaaagcatggtcagtaccagcaagctttaaaggttggcccaagccagttgaataaggttgtcaacacggcttatgccaacaaggatagcgggcaggttgccaagtgggaattgccaactaaggcgacaagcaagcaaaaagaccaattggcgctggaaaaagccatcgttaactacgacaccaatacgctcaataaccaattatcctttacgacgaacgctgatgttttattgagaatgggccaagccttcctagcccataacgatacgcaagacgcccagaccgtccaaacaaaattagctggggtgaacagccctaaagccaagtatctcaaagcgctattaagtctcaaagctgctaagaatgaagttagcgacgcccaaaagaagttagatgacgccaacaagattgatggcagtaaagataaggataaagacaagaaggtggattcggttaaggctgatctaaagaatgcgcagagcgaccaatcggcagcgcaaaaacaagttgatcaggccaagcacaaagtgggtgattaaatgcaggtattgtcgtttgaatataagaaaaagaagtggaagttgattgcttatattgtgggcggtgccattctgctaatcatcttgctgattgccgcggttactggtcagctacaagaaaacagttgtgataactcaaccaccacagagacgcaattagatagtaagagcatgacagaaaatgccaaaaatatctatgcgcactggaaacaaaaatatggtgcgaccccacaagcggccgccggtatcttgggggtcttacaactagaaagtcgccttgatcccaagtccgttaattccagttccggggccacgggcttagcccagtggttaggtggtcgaaaagataaactggaagatttagcccataaagaaaacaaaccagcgaccaatctcggggttcagttggactatctcgatcaagaattggacagtagttactatgcgtcaaacaagcagatctttaaatatacggacgtgcacaaagcgacgaaagcatggttaatggattatgaaggcatgagcaaaaacccggaacaatggtatttaagccaaagatacggttatgccgatcattggtattccgtgttcgggacgagtgatcccgtggccggtaatacgttagacaatgcaagttccggcgatctgaccgagttaggttgtgatagtgacccgagctattccggtggcagcattgttaaaaacgcggaaagtatgaagggcgacttctattatgttcaaacccaccctagccccgatttaggtagcgatttaaagaatcctaacaaaaccggtgggacagattgttcaggctttgtctggttagcgcttaataaagctggttacaaggtaccggataacatgggctggtttaccggcacgatggccagtgacgccaaaggtagccatcaatacttgaaacagatcagtgaaactgacgcgaaagccggcgatattgtgattgttaatcaaggcgccggggccggaaacaacgggcatatcgccattctattagataaatggcaaggtaaagccaccaagattattgagcaaggtggtacgggtgataaagttaacgaaagcacttttggggcagctttttatagcttactaaatggtggtgatataacgttagcccggccaatcaagaagtaaggagggaaaacaaatgaagcggagcatagttttaagtgtggtgattggcagcttgatcttagttatgtcattaggggcaaatgcctatcaacatagccaagttaagcaggcgcaacagcagattagtcgtctacaaaaacagaagcgccaagttaaccagcaattgactaaagccaaccaacaaaagcagttattgagcacccaaattgacagttataagacctaccaaaataataaagacaaaagtcaggctgaacttagctttaatacggtggtcaccaagttctttgaggtcatgaacaactttaagcccaagacctacggccagcgtaaagatggcgtgaaaggcttgatttccgacaagctatatcagcaatacttttcaaataaaggaacatatggtgatagcaatagtgtttcagctaagttaaaccaactgaacctgtatacgcaaagcaagcaggggcaaagcatgaaaggtttggcggttgttagctaccaaagtaagagtggcgacaacgactggcagaaggcaacggtactttatcaggtgactttcgataccaccacggatcgaatcactgcagtacaaaatttaggaagcagttttaaagccagtgaccttaattaagcgggttggtaaagccctagcgataatcgtggtggttttagccgttggcgggtttgccagtcatcaatatgtcaaccacgtagaaaagcagcgaccaatcgtgactttagctaagcaccctaaaaaagtgttgttcttctatcgcgatgattgcccggattgccaagctatttttcaccgaatctattggcacaacgtcattagccataacgttgtttttattaacatgaatcaatcgcagaatcggcattacattcagcaatatcaattaacgtcagtcccaaccttgatccatggcaagcaacggtacaccggcactaaccaaaaaaggattaaacagatagtaggtgattagatgaaagacaaattattaaacagcattaaagctagttggccgtatttactaacactaatctttggcttgtatttagcggagattttagctggctctgtcatggccttgtcgcgctataaactaacttttgcggatcatatgccaacggtgttaaaacaattagctttacacccctggcattattacaacttgtatttgggccaaaagaacccagtactaattattgtcagtgtcgccgtgatcctatacaccatctattttgccttgaaacgaagtagcaaacataaagcttgggaaactgcggacactgaaacccacgggagtgcgacctggggtgatctaaaagagttgagtgaccattactttagtatcaatgctaaagacctcaccacagcgtttaacaggagcactacaacagaaatattagaggcattaacaaaacaagaaacacaatccaagacagacaagtgaaaggaagtaagaagcatgaacagaccagatttattagtacgaatagttacgatcatcacgttgttaattgcaatagttttgtttctatttcagggttggaacacacctacttttgtatttacagttatcacagtcattttatctttcatttatcagttaatcagaatacagatgaaaaagaagtaaatcagaaaagtcatctaaagctaaccacattggaggtaaacgcatgaatgggacaattttaggaatcgtagataaacagattgtttaccaaaataacagtaccaaacccaatcggaatatctttgtggttgggggcccaggatcgtataagacccaatcagtcgtgattaccaacctgtttaacgagacagagaacagcattgttgtgaccgatcccaagggggaattatacgaaaagacggccggaatcaaactggcccagggttatcaagtacatgtcgtcaactttgccaatatggctcacagtgatcgctacaatccttttgattatattcaacgggatattcaagctgaaaccgtggcaacaaagatcgtgcaaagtgaaaatgccgaaggcaaaaaagacgtatggttcagtacccagcggcaacttttgaaagcattgatcctatttgtgatgaaccaccgtgcgcccgaccaaaggaacttggccggtgtaacgcaagtcttacaagaaaacgatgtggaggccgaggaaaagggcgcagatagtccgttagataccttgtttcttgatttaaccatgactgatccagcgagacgcgcttatgagttagggttcaaaaaggccaaaggcgaaatgaaggccagtattattgaaagcttgttggcgaccatctcgaagttcgttgacaaagaagtggctgattttaccagcttttcggattttgatttaaaagagattggcaacgacaaagttgtgctgtacgtgattatccccgtcatggataacacttatgaaagcttcatcaatctgtttttctcacaattatttgatgaattatataaattagcggccgatcatcacgctaaattgccccaccaagtcgattttatccttgatgaatttgtcaatttagggaagtttcccaagtatgaggagttcttagcgacgtgtcggggatatggcattggtgtgacgaccatttgtcagaccttaacccaactacaagccttgtatggcaaggataaggccgagagtatcttaggtaaccatgccgttaaactttgcttaaatgccgctaatgacgtgaccgctaaatactttagtgatctgttaggaaaatcaaccgtaaaagtggaaaccggtagtgagagtaccagtcatagcaaggaagaaagccacagcaagagcgatagttacagctatacgagccgttcgctcatgacgcccgatgaaattatgcgtatgcccgaagatcagagcttattaatctttagtaatgcccgaccagtcaaagctacaaaagcgttccagtttaaactatttccgggggctgatcatttggttaacttgtcacagaacgattatcaaggccaaccagaagccagccaggaaaccaactttaagaataaagtagaaaaatggaaagcaaaattaaaggagactgctcaaaaagaagtcgcaaacaagatgtctcagaaagaggaggagcaacaacaggacaacctagacagcgatttagagagagtttcaaataaagatagtcaaacagaggcgccagaagaagacgacaacaacttatttggataatggagggcatattaatgaaaaaatatcgcaaatatataatcgccgtgatgacagtgttactgattgttgttggtcttaccgcttgtgggaagtctacagcacaagatttgcaaagccatcagtggacatttgcttctagcaaagataatggtatggccgctactgcaaagttttcaaaaagcaacttaacacttacccaagcgggctttagcgaagtttatacttacaagttgattgaaaacaagggcaatgaacaaattaagttcattggtaaaaatagtgtttcaggtagcacagaaacacgtttgtttaagattaaaaagcagtcagacaaatataaactaacaccaattaacacactggctaaaagtgatactggtacggtctcactcattcccaaatagacaaaggaggattttaaaatgacagaaattattcaatcagctatttcacactttttcgaatggctactgtctggtttgttagatggtttattcaacatctgtaaggcaatcattgaccaagccaatcaaagcttgccgattgttaaaacgtggtatgccatcttcctgtcctttgcgacatcgttagtcgttgtggttgtccttgggcgtattgtgatgacaattataaaagaggcggacgaaagtaccgatgtgacttgggctaatatcatcatggacgggattaaatcagcggccgtgatcccggtcttcgtgttcttacagggctttattcaaggttcaattaccttgcccctgctaaagtatatgtttagttctgatcagcagttcactgctaaatcaattaccggcatgaataaagttcctgggttaaaagatgttggcatttcgctacctttacagattttgtttctgctaatcttcactgtcgtaaccgtcgtgttctttatcaaaatgtgtgtgtttgtggctgatatggcgtggtataacctgacaattcctttagctgcaatgagtatggcgaccgaaagctttgattacagtggcacgtggtggaagaagtacatttattacaatgcttctattattagccaggtgctttgtatgtcactatcagtatggtgtttcactaatatggctaaatacgggtttattgcttttattgcttcaatcggattcggctttctggtggtcaaaacgcctgacgcggttaaagacttttgggcttcaaccggtgtgactaagagtgctggtatgggtgccatgagaatgtttcaaaattatttccgtaaccactaggaggaaaaatagttatgaagaaaatcgcacactggctattggaaaaagccaaaaaagatatgcgaactgacccttttacaacaccttcccggcggactaagttgtcttactattttgataacttagttagcatgatcttctatttaatgggaacttacctcatgttaatggatttataccaagagcttttcacggcgaaccataccgattttttaggaactgcgctaatggccttagttttactgctgggtggcttattattccgttggtcagcctatgcagatctcaaagccatcaaccggtatcaacattatttgaagcaacaatcgatagagcaacaacaagaattgcgccatgaaacttggttgaaagcggctgaacaaggtaaaacagaattagatcaaaaacttaatcacaaggagtgaacgaacatgaccactgttatcttagctgaaaaacctagtcaagcccgttcatacgttcaagcctttcaaaagagcacaaaaaaacagggttactatacggttagcgaccctgttttgcccgaaaatacgcttgtcacgtatggtctcggacatttagttgaactagccacaccggataaatatgatcagaaatatcagcaatgggccttatctaatttaccgatttttcccgataaatacaagtttgtggtgtcagctagtaaaaaagatcaattcaaggtcgtcaaagacctgttaacgaaggccgataccattattgttgccactgatagtggtcgggaaggctctaatattgcgtggtcaatcatgatccaagcccagattgacgttaaaaagaagaccattaagcggctatggttgaatagtttggaaaaagacgccattattaccggctttaaaaatcttggtgactggcacaaagactatttggcttataaagaagcccaaacccgtcaaattagtgattggttgatcggtatgaatggtagtcccttatatactttgttattaagacaaaacggggtacgcggggtatactcaattggtcgcgtgcagacgccaaccttgtatatggtctatcaaagggaccaggcaatcaaaaactttaagccggaaccttattttgagctaaatgcggaaattttagctaatcagcaaaaatttgtcgcaaaattagacccttatcagcgatttaaagacgaagcagggctaatgacattcatgcaagctaaacacgttcagaaaggctcacagggtggtttaatcaaggacgtgcaaaagcaggctaaaaagagtgccagtccccaactattctcgctatccagtctgcaaagtgccatgaataaacgttatcacgccagcgccagccaaaccttagcagccattcaaagtttatatgaagccaagttgttgagttatccccgcaccgattgtgcttatatcactgatgaagaatttgagtacttagtggctaatctgacgaagtatctggggttagtctctaagcaagtcgctttaaccaataccaccccaaataaacgttacgtcaatgggaaaaaggttgaagaacattacgccattatcatgactaaagttgtgccgacgaaagagaaactagccagcttacctaaattacagcaacaggtctatgatttggttttaagaacgacgttagcgatgtttgctgatccttacgaatatgaagaaaccaccattgttacccaagtcggcgatgctaattttaaagcaacgggtaaggtcccaactaagcaaggttggcaagcattatttgatgaaaacaaagccgaccagcaagaagcagccaccctaccgctcgttcaccaaggcgatcaagtccaagcaaatctgcaaacaccgcaaaaagaaacgacaccaccggtaccctttaccgaaggtaccctgattacggccatgaagaccgccggcaaaacgcttgatgatgaagcagcccaagcgattcttaaagatgtgcaaggcattgggacaagtgcaacccgggccaatgtgctggaagtgttaaagaaacgcggctatctcgtcactgaaaagaacaagctacacgtcagtgaagccggaattactttatgtaaagcggttgaacttgagcccttgctaactagtccagaaatgacagctaaatgggagcaagcgttacagcaaatcagtaccgaagaacgcaccccggataactttttgagccaaattaagaagtttgtggctaaattgatcgctgatgttcccacgcaattgactggcagtgcagccattaagcaacaaatcaatcaccaacagcaagcacaaaagtccgccgaggtcttcttagaaacaccgcaagcgaccgttttaaataaacagaagttttatattgtaaagcctaagcaaggcgaagactttaccctgcccaagaaatggagcagtaagaccctcggtaagaccgcaattaaagcgttggtcaccaagggggaaaccagcaaactaaagggtttcaagagcaaaaagggaaagtcgtttgacgccaagttaaagcttgacggccataaattaagttttgattttgattagaacctgcctaccgccctatactacgttccggttggttaacccgtcatttaggttcacttttacaatcccaaaagtaaacctgaacaacgggtgagattaacaaagcaaaggagatcataaaatgaacaacgaattagcagttttagccagtgaattacccgttttgcaagctaaaggaacctacaagtatttaaaagaaatcactggtaacggcgcttattatcaagtagcctggcaaaaattgtctgacggttacgttgccctttatggcacgaccccgattcaaataagatcattgccaacattgaatgatatttttgaagatgaggaggggtaacttatgccaaataaagcagatgtgaaggcttggaaagcacaattagtcgcccaggctgaacagcaaatcctaaaattaactgatagtgaccaatttaaaaagtatctcaataccctggctaaatttcatcgttatagcgccagaaacattgatttaatttatgcgcaaaatcctcaagccactcaagtcgccggttttaagcaatggcagaaggattttaaccgcaccgtcaaccggggcgcaaaagcgattcggattgcggctccgatcattaagaagctaacaccagccgagcagaagcatcttgataccaccgatgagcgcgccattgtcggttatcgctatctacccgtctttgatgtggcacaaactagcggtgaaccagtgttaagtgctaaagactttgtcaaagaaaatttggccgatcatcagaatgtgacaagcttatataacgcgttcaaggattatttaaaccagcaaaccgaccttaaagtcagtgaagtgcctttagcgacgctaaatggggctaagggatattttcaacccagcactaatgaaatcgtcattggtggcgatgagcccgacaatgctttgaaactaaagacgttataccacgaatatgcgcatagccagctacacggcttaaaatcagcctttaaagatcggccacgagcctatcaggaaacccaagccgaagcggttgcgtatgttgccatgcaaaatattggcgttgataccagcaactactccctcggttacgtggccacctgggctaaagataaagccgtgatccatagtgctttaagtgagatccagcaagttagcaacaaagtgattgagcttagtgacgggttaaccaaacaattaggcttacaagaagcccaaaaagaacctgagcatgatctaaaaaagctatcagcccatgatcttaataagtcctaccaaggcttgcaacaacaagttcagcaagcaactaatccacaacaaaaatcagaactacaaaataaattaaatgatgtacaccaggaaatcagtaatcgaactcaaaaacaactgaaagtatttgctgaacagcatccagaaatcaaacaaccagattctgaacctgatcaaagtctaaaacgttagccagtttttaaaggtcatgctataatgtaatagaaaagggaagccttgcgctaacaagacttcccatgcaagccgcttcaaaggcggtggcagaaatttaataaacgattttagctcgtcctgtgacctctaccaaagttacacagggcggctttttttatttgtgatgcttgtcgatatagctgaggagcgcgattaaaaacgtgccaaacagcaacatcaactggaatgtttataattgattcaagaaaatctaaaaacgatttttttcagtgatcgaatattaacagactaagcttagaactgtgtctttagtgctcacttttgtatgctaacctaaagtttaacaagtgttgccacttccgacccagatgttttgaacagaacattaggttgtaaacgtggtgttggtgaaatgtagtcgtatggctcccctgcaaaagttttaagcactgccattaggatatggcgcataccagcaggtggaatcgccataccaatttgtttccgcacagattctttaccaccaatgaagtgataattatcaggaaaggtttgcagtcgtgcacgttcacggttggttaatgctcggttttccttccagtgatacatatgggtaccaccgcctccagatccggtaacagtatatgacggcttattacggtctaggcgcttatagatatttgaaagccgagctcccttgacgtttagacgcagactttcaggaatttggtgcgaccaagcattaccaccttctgggatataggacaacatctcaatagtcgaagccttgtgacgtgttaattcgttattaaacgcgtctgctggaatcggtggattagttagagcctcgccagcggtaacatagtcatctggattgggtgtggtcggggcaggtacgtgaaatttaatgccttgaatagccagatcattgcgaataccaacaattaatatacgatgccgggcctgtggaacaccgtattcctcaaacttatagaagtttggcgttagtgtgtaaccaacatcggctaatgatttgagaatttgaatgaaagcatcaccgtcgttggcagaggttaggccaccgacgttttcggcgataaaaacctttggttgaaactcctttaatgttttaactccgtaagtatatagtggaccatatgttccatctaaccccttttgcttgccgacaacggaaaaatcattgcaagggaatccgaaaatcaacgcatccatatcagtcagtaattggtgattagtgagatctaatttccttacatcttcgcagtaaacggtagtcgccttagggttattaaggatgttcagtttataggtatcaacagtatctttatcaaattcatttgcccaggcatgttgatacccccattttctgcccttagtatcgataaagtgtgaagttttagcagcatatgcgccaccaccaggtccagcgaataattcagcagttctaaatatcatagtgaacacctccatgagttcagcatatcgaacaagtgttttagcatatgcctatgctaaaaatcatacgactttttattacatattgcaagctctaatagtcgtgattaatctgctttagtgtgggaaaatggagaataataggaggactaaaaatgacaattttatactctaaagtaccaccgatgccatttggggagagcttaccacttatttctaatcagttggtaaaagaggcgagttcagcttcgagaattgacattgcagtaggctatgtttctgtagatggattggataaactggactcattagtttcaaaggggaacattaagcagatctgtctggttgttggtatgtatctggaaagtggtattccagaaagtatctataatcgggtacgtttgttacataataaatggcaagctacaggtaaaggcgaaatccgctttgtgaacaatatgagctatcatggcaaggtttatctcttttggcaaccgaaccaacaaggaaatgatgatttgaagtcagcggtattaggatcagctaatttaagcgtgctggccccgttgggatctgttgctcgtcaatatgaactagcaaccacaattaccaattctaaccaactgcatgaattgtctactcatattgagaaattgaaaaccagctgcaccgtttctgccaccaatttaaacgatttcaaggtaatccacgagcggatcgaagtgcttggcgggatcgaagaagttttggaaacgaccgaaagtgaacaagatatgtatcgttcactgcagactgatattgagattaggattccaattaaagcaccattagctactaatcgtttttctaccgcccggcatgattacgcgcgatcaaatatcaatgtggcctatggcggcggtcggtataacaaattgagtggtggtgttgatcccagaaattggtatgaggttcaaattaccgtaaataagacgatctctactcagccaaactaccctaaaaataagcctttttggattgtaacggacgatggttataaatttgaagcgcataccactgctgataacaataaacaactgacggcttatggtaagactggtaacgatcgcgtttttgggcgctggatcaagggacgattggctacagctggatacgtcaaaccagtcgataatacagccgccgatacggaacgtctcggcgttgtaacgcaagaaatgttaaacgctgcccaaatgcgcgtgatggttcttactaagacatctacacaggaatatggggtggtattcaatcgattagctccaacaccacgaaataagaaaggtgctttagacaagaaacattggacacgggaattgctagacgtctggacagttcactttgaaggtgagaaaagctaatgggatatcttaataattacctacaacaatttcgtgatgcaggtaaagatgagcttgcaaacagcatagaaaaaacgtctcgacgtataggcaaaaaatacatcagccatttcacctatataacacatgaaatgggattgctttttggcaatattcaaagtgggaagacgggacaaacatttggcattatctgtgaagctgctgatttggaatttcgctacttcctactgatgacaacggacagcaaactcctacaaaaacaaacacttgaacgcgcacaacatgatttgcctgaatttgcaatctgtagcgagaatgatgaagaaaagttcagaagcgcaaaaaatcagccggtactaattattgtaaaaaagaatacacgtgttttacaggcatgggttgatcgattccgtaattctcaaaaactgaagggaaatgcattattcatcgttgatgatgaagctgatgctgcttcagaaaatacaaaggttaatcaaaaaaaggtttccgcgatcaatgatcgactacgaaaaatacgtgatacagcacaagcatcaatttatcttcaagtgactggtactccccaagccctgctacttcaaagtcttaactccaattggcggccaatgtttactgaatactttgaacctggtaatggctatctcggtggtgactttttctttccgggaacagagactaacgatatacctaacttcattcattttgttgatgatgaaacaccgcaagaaagcgcaaagcatgttgtgctccgccacttggtcgtatcagcacaaatattgctaactggtggtaaagtctcaaactgtttagttcaccctggcattcgacgagcagctcacgagaagtcaaaaaaagaaattgaagatgcaattgcctggtggacttaccatcatgctgacgaaaaattcactgatgcatttgatcgggagtatgccgctattacaccacaaaatactgagaaacaaccacacgatcaagtattgacacgtgttaaacagattcttgaaaaacgtgagtttacgattgtcctattaaacggaacatcaattgacgatgacaaagactatgagtctggatgtaactttgttattgggggaactaacctgggccggggtgtaacctttggccaattgaatacgttctactacaccaggaccagcaaaaatccaaatgcggatacgatgtggcaacataatcgcatgtttggctatgatcgtgaccctggcttgataacaatgtatagtagccgggcgttgtataaactttttgcagaaatcaatgagactaataactcgattatccgtcaagctcaagcaggaaagaagattacaattgcatatccagatggtttgaatccaacgcgatctaatgtgttagataaatctttgctgaatatcctggttggcggatcaaaccactttccaagcgtaccgaagaacgaaacgactacgcaaatatcagatttggttcaacaattttctaatgatgatccagctactgaagttagcctaaaatttatatcggatattttgaagcatttcaaagcagaaaaagagtttaatcttgatggttacatcaaaatgattgatagtgcccgtagtgagaatccgatggcaagcgcccatattcttgtcaggcgtaatcgtgccgtgacactgggaaaccgtgcattgctgtcaccaaacgactggaaagaaactaatcaattccaagacgagttcgtattaacactgtacaaagtctctggagagaagaacaatggtaagtcagtgtgggtaccgaatattaagttaccgatgaaaaagaacttttatattatttaaattgtaattttaatataacgaaagttctttattcggcatcgaaagaaagcccaatgtaaaataatcaatggcacttttgacttttaaaaaaaagaggttgggtatcatgaatgacagtcaaaaatttttagataaagtagaagggaaaaatatagattttttaattggttctggtgcaagttctgattatataagcactctttctgttggggaaaaagggaataaacacagtattgaagaccttttaactgcctataattctcaaaaaatggcacaagcttttttgaaattccttttttttgattcatcagtcaaaaatggattagttagcactactcacattccagaagaagcaatggatactctgaactcttataaagaattaattgagaatatgcttactctttcgcgccacaacggatttgaaagacctaaaagaactaatatttttactacaaactatgatacatttttcgaggccgcttttgatgatatttctcttgaacaccccttagccttttttaacgatggctctagaggtttctttacgcgtgaagttagttacgaaaactattattttaatgttacccacagtggatccattgacacatttcgtagagagataccgtctattaatctgtataaattacatggctctctttcatggtcaaaaaaagttttgaaagatgaccaaaccattattacatcaagcctagaaaatgaattactaacgaaaataaaagaagaatcagatactattttaaagatgttgaatcaaggaaatagaattgaagtaactgacgaaaacgttattgaccaatatcttagcaatatagaaagaaatgaagaactaaaagatgaactcggaatatttgaaaacgattattccaagctattaattgtgagtcctaccaaaagaaaatttcaagagacagtgtttcagaaacaatactatcaactactaagagaattcgaaaatgagttgcaaaaggataacactgttttaatttgttttggtttttccttcaaagatgaacatattttagatctgttaaaaagatctatttccaatccatctttacagattttcgttattccatatagtgaaaaagacgttgactatattaatcttgtgttaaaaggatatactgatgtgacatttttaaagtcccctgatactaacgagccaggtaacttcaatgtcctaaataaatttttagaaggagcctatggacaatgaaaacagctaagatggatccgttaccaagtgtcggaatcgtaactgaagtaaaggggacttacgttacagctagaatgtttgaaaatactaataatttaacatattacagaaacggggttacatataggggagtgggtactggagaatacattggaattcaaagaggcccctataaattagtaggcaaggtccttcacgaatatttagaagacacgcaaaaagacagtaatgatcaggaattttcaaaaaacagatttattagagaagtggatatttcaatcataggagcctttaggcaaagtaaattcacttttggaatttctatttttcctcaaatattttctgaaatcgtattactaagttcagaagaaacccttcagatactaacgggaaatattctcaatatagattatccattatatattggaaaaacagtccccgaaggacttaaatatgcaattgattggtcgcatatctttaacacgcattttgcaatttttggtaacactggcagtggaaaatctaacaccttggcaaaaatgtattcagaattatttaatactgctgataaaaataattggaatattaataattccaagtttatttttatagattttaatggtgaatacactggtgatgaatcgttaacatcaagcaaaaaaactattgaacttaatacttcatctacatctaaaggagacaaaataatccttcctagatcagaattctgggatatagaaatgttgtcagtgttgttttcagcaacgcaacaaacgcaagaaccctttcttagaacaactttaaagcattttaatcccgggaaaaataaagttacaaagaaagaaataataagttacgttgtaaccgccttttgtcaggtatttcaaaacaatgtgcaagacccaagaacgttaaatttacttaaagtaattttaaatgacttacaaattaaaataccagaaagttccgaacttagcatttggttaaaagcatcatggaacagcaatagtggcacatatttttctaatattgatactacttatacgggtctattttggagttttactagcaatggcaaaatctattttaataatatggtcaataaatcagaatttagatatttgatagaagaaactctaaattgggaggatgtcatgattgatactgattggcaacctctaactttgttatctgtgtttgtccatctacaaatgatttataaattaacctacggaggagctcaatttgatttcattgctcctttattaaacagaattgaagcaaaatcaaagatgtttaataagttaattaaagtaagcaatgacgactcggataatttttctgagaaatattgcacaataatttctttacgtaatgtcaataaagacgctaaagcaacaattccattattaattgcaaggtatctttataagcttcaaaaaaaagacttattaggagaagatgaaattactaagactactaaccttataatcgacgaagcccataacattctttctgtaaacagaaatcgagaaggtgataaatggcgagattatcgtttagatgtgtttgaagaaattattaaagaaggcaggaaatttggcttctttttaactattgctagtcagcgtcccgctgacatttcagcaactattgtttctcagatgcataattttattattcatcgtcttgtaaatgaagttgatttgaatatgttaggcaatacattgaattcattggatagtgtttcaaaatctgctatcccttctctagcccctggaagtgctatctttacaggaaccagctttccgctccctgtaatggttcatatagatcaattagataagggacatgctcccagtagtgataatgctaatttaaaaaaaatctggttaccacatgaccatcaaaaatgattttttgttttacgggtcataactttaaaaatccagcctctaaaaaatcatcaggatggtatttaaatggtcacggttccacttttcttgtaatcgctaaaataataactctttaaggttctggtgcaaattttcctcgctgacttgattttagtatactgggtgccaagaaacgagggattgcgcgcatgaatcactttaagggacgccactttcaaaaggacatcatcttagtagccgttggctactatttcagattcagtctcagctatcgtgacatcgttgaattgcttcgggatcggggtatcactgttcatcacaccacggtcatgcgttgggttcatcactatggccccatctttaaggctctatggcgtcggcatcaaacagctcacgctaaaagttggcgaatcgatgagacctatattcgagttaaaggccgttgggcctatttgtatcgcgctattgacagtaacggtttgaccatggattttgagctacgaaaacaccgcgattataccgcatcctatcactttttgaagcgtctcttgacgaccaatggtcggcctgatcgattagtcactgatcaatatcgggcaacactgaaagcagtgaagcacctgataaagcaagactatttgagcaaatcaacccaccaatgttccaaatatcgaaataatttgattgaacaggaccaccgattcattaaacgtcatcgtgtccgctcagcaagctttcaaagcattcgaaccgctagtgcaacgttgagcggtgtggaaattgttcacgcaatacgcaaaagaacccgacgagagttaagtctcatcgggttctcagtcgtggacgaattagaagcattgttagctgcataaccttcaacataggatcaatagctggttagatggtcatctctcacactgtttgcaccagatccgccgagatcacacttcccgactcaaaaatccgggcattcgtcattccgaccgatgaagaattgatgatcgctcgcgatgtagaacatttcaaaaaattaggtaaataagcgctaaaacagatgacacatgcgatcgacccgcttttgcgggtcggttttttttatgcaaaagagttattatttgcacaataagtccatccactttacgatgggttggtagataacttaaggaatttataaagaaaacgaggaggaagaagaaaatggacaagatcaacaagaatgatgaaaagcagctggaacatttaggtgcctttgaaatcagcaataaaatgctgtcattggcacaaaaaagcgaaaaaaataatatctttttgaatgctggccgcggaaacccgaactggatcaataaaaaagcccgtttggctttcactcgcatcgttgaatttggggtccttgaatcagaacgcacaatgaaagacggcgatttagccggatataccgaaaaagacgggatccgcgaacgttttgaaacattcctcgatccagataaaaacgaaaccgatcaatttttgatgaacgtcttgagttatatcaaagacgaactgcatttggaccgcgatgaagtcgtaaaagaatttgtggatggcgtcatcggcaataattatccggtcccaagccgcatcctgaaaaattccgaaacgatcatcaatcattatctgcaatctgtcttgtatcacggagaagatttggaaaatgaaacgcaattgttcccaacagaaggcgggactgcagcgatcgtttatattttcaattcgctgaaagaaaacaaattgatcaaaccgggcgacaagatcgcgctcaacacgccgatctttacgccgtacatccaaatcccagccttgaacgactatgaaatggtcgaaatcgacttgggctcgaaagaagaaaataattgggaagtttcgccgaaagagatcgacaaattacaggatcccgatatcaaagctttcttcattgtcaatccaagcaacccaggctccaaagcatttgaccaaaaagcactgaatgaaatcaaaaaagccgttgcgaagaatccgaacttgatgatcattactgatgatgtttacggaacgttcgttgacgatttccaaacagtttacagtgtcgcaccgaaaaatactttgcttgtttattcttactcgaaactctttggagcgaccggctggcgcttaggggtgatcggtgtcagcaaggacaatgtctttgataaattgatcgcggcacttccgcaagcagataaacaagcactcgaaaaacgttacagtcttgttgttttggaacccgaaaagatgaaattcatcgaccggatggtagcggattcccgttcgatcggcttgtatcatacttctggcttgtcaacaccgcagcagatcatggaagtcctcttcagcttgacgcatttggttgagaagacgaaaaacgatccgtatatcgcagcttcgaacaaattgatcgataaacgctacgacgacttgcataaagccttgacgtatccggaagacaacagcgaaacttctgcgaaatattattcgatcatcgatatttacgaattggctgaaaagcgtcacggcaaagcgttccgcgaatacttggcagacaacttcgaacaagtcgacttcttgctgaaattggctgagaagaacggcgttgtattgatggatggtgtcgggttcggtgcagcacctggcgatttgcgggtttctgaggcgaacctgccgacggaagattatcgcttgatcggccgtcaagtgctggaactgcttgatgaatattataaaacgtttgaagcacaaaaataggggtggatagtgatgaaagcaattgtggattatttgcttgccaatccgatcattccggtatttcttagtctgagcctaggctatctgctggggcgtttcaagatcaaaagcttctccgtcggttcgacggtcggggtcttgatcattgcgcttattatcggtcaaatcggagcttttaagatcgatccgcttgtcaaaagcattttcttcgatctctttatctttacgatcggctatgaagtcggaccttcatttattcgcagtttgaagagtaccggacttaagatcgttggccaaagtgtcttcttcgcggtagttgcgtttgcgatcgcgatggtcttgtttaaactattcaaagtcgaccttggcgaagcggctgggatcatcgccggcgctttaacgcagtcggcggtcatcgggactgccaactcgtcgattaatggtcttgatatttcttcagctgctaaggcagcctacaactcggaagtcgcgatcgcatatgctttgacctatgttttcgggaccgtcggggtgctggtcttcttgaagaatatcgcgccagcgatcctgcacgtcgatttgaaagaagaaacgaaaaaattggcagaaaaactcaacttcacttccggaagtttttcgccattgactagttctgtgcgggtcagaggatttttgctgggagacgattctccgattgtcggcaaaaagatcttgcaaatcgaaaaacaatatcactatgaatttgttgttgaggatgtgctgcgcaaggaagaaagcatcccggcaaccagcgacttggtcctttcgccaggcgacgagatcgtggtcgtgggcaatatggaagaatttttacagttggaacaaagtcatggaacgaccgaagtttcaaacaaacagtatcgtaatatccaattgaaaacgatcaatgtgatgttgacgaatgcttttaatttccatgctttgcaagatatggtcaagagcggcttgatgatcacctccgtcgaacgcgacggcaaaaaagtgaccgatctgacaacgatgcgcagcggtgaccgcttgacgattatcggaactccgcgggcactgcaaaagatcttgccagaaatcggctatgagatcgctgaaggacaaacgaccgatatcagcttcttgactatcgggatcgttctcggggttctcttgggatcgatcgtggtcaaagctttcaatatcccgatcacactcggtgaaggcggcggcgcacttttcttggggctcttcttcggatggtatcaagaaaaacacgccaacatcggcaatatccccggacccgtccgctgggtcttcaagagtctcggtttgaacttgttcatcgcggtagtcgggctgcaagccggctcagactttgtcagcgccctagtgaagatgggctggaaagtattgatcatcggggcgatcatctcgatccttccgcatttcatcacattgctgttcggtcgatatgtcttgaagctgaacgcgatcgataatatcggctccttgactggggcgggtacgatcaccgctgctttgaacgcgatcaatgaagaaaccggcagcagtttgttcgccctcagttatacaccagggtatgcagtcggcaatatcctcttgacgatcctcggaccgttgacagttgcgcttttgagttaggcaaggcgcaaaatcataaataaagaggttgagacaaaagtgtccagcttcaagaaataagaagaaaaatccgaaaatagtttctcatatttttgagatttttcggcttatttccgaagaagctgcttttgaaacaccgtttattcggaaaaagaggctgggacatgacttttgtcccagcctcttttttatggttctataatatttagtgttggtggaaaatccttcgggtttttcttccagcactcttttttattcttgaggatagaaatagagatatccaaactgataaaatgtagtcgacgaaaaccaacagtcatcaggaaaggatatctccatggatcatcatactagaaaacttttaggtttcacagataaaaatctctctttcagcgagaattggctgaccgaacgaactcacgctgatagaacttgttcaattgttcctcggcaatttgctggcttggtaacggatcagtggctaatttgacgcgaccattttcacttgtggctaagtagtattctttttcagactgaccaagttcttgcgtttccaaaacatgtagattatgttcataacgtcctaatgcgttatcaacttccaacccataaaaaccaagaaagctttttagaaggctttcttggtttttatgggaaggcggaaaatctgtcgatacttcgatgggtttcacgccgcttgccggcgtaacgatggggactcgttcaggcgacgtcgatgcttcccttttgccttatttgatggatcaccttgggatgacggatgttcataaaatgatcgtcatcctgaacacaaaatccgggatcctcggtttgtccggaatctccagcgatatgcgcgatatcgaagctgctgtcaaagaagataacaaggccgcggaactggcgcttgaaatctattgcgaccggatccgcaaatatatcgctcagtatatttctgttatgaatggggtcgacgcgatcgtattcacagccggtgtaggcgaaaatgatactgggatgcgcgaacgcgttttgaaaccgatgacttggttcgggatcgattttgatgttgaaaccaataacaagatccacgggaaagaagccgagatggttctggtgcaaattttcctcgctgacttgattttagtatactgggtgccaagaaacgagggattgcgcgcatgaatcactttaagggacgccactttcaaaaggacatcatcttagtagccgttggctactatttcagattcagtctcagctatcgtgacatcgttgaattgcttcgggatcggggtatcactgttcatcacaccacggtcatgcgttgggttcatcactatggccccatctttaaggctctatggcgtcggcatcaaacagctcacgctaaaagttggcgaatcgatgagacctatattcgagttaaaggccgttgggcctatttgtatcgcgctattgacagtaacggtttgaccatggattttgagctacgaaaacaccgcgattataccgcatcctatcactttttgaagcgtctcttgacgaccaatggtcggcctgatcgattagtcactgatcaatatcgggcaacactgaaagcagtgaagcacctgataaagcaagactatttgagcaaatcaacccaccaatgttccaaatatcgaaataatttgattgaacaggaccaccgattcattaaacgtcatcgtgtccgctcagcaagctttcaaagcattcgaaccgctagtgcaacgttgagcggtgtggaaattgttcacgcaatacgcaaaagaacccgacgagagttaagtctcatcgggttctcagtcgtggacgaattagaagcattgttagctgcataaccttcaacataggatcaatagctggttagatggtcatctctcacactgtttgcaccagatccctctttaatatttctgttttttgacaaatatctgattcaataaattcactgctggcctgtgcaaccatacaatacttaaagtaaaggaggcacctttattgagggggagcgacgtaatgaagcttcgtttggatgggggcaacaaataacagcgtaaaacggccattagggtatatcctagtggtcttacttgtctgcacgagctgcttcaatttgcaagagttcaatagcattgtccaaaattatcaatcaactagcaaacagaggaccttaagcaaaactactgaacattgcttaaggccctctgtttgctacgtattatctaagtttatgcattgtttctgccataatccaatgaatgaattttaaattactgatgaagaatataaacattatgactacaacgataatccattcccatagcggagcttttgttaatgtgactaagctgtataagtaaaaaattgttatgggtaattcaataattgcggttatagctccaggaacataagcacgtttattaaagacaaaaactaagtgcatgatcaaatgaaacagatacggtaaaattgcagtggcaactagtaatggtgatcccatgatataggcgactgctgcgagcagtaaataaatacaaaattcttcccagattccagccgctaaaatatctgaacgattcactccaccaaacagcacacgcccgttaattttgggattatgatctttcaaccaatatgggacaaatactaactcttcaaaatcatggaacataaataacaatggcaatatccaataagaactaaaattaatcattttatggccctcccgctagtattatattatgttgatgcgaatctttgaatataatggaaacatgtgccactgaaaggagtttttgtgccatgtctcggaaaatgattattgaagagtctaaaaatgcttttattgaggccttgtttcaactactgaaaagcgaatcctttgaacatattacagtcaaacagttgacattagaatcgggttattccaaaaggacttattatcgatacttcaaaactaaaacaaaaattttagatatagcattttgtaaatatctcactagctatcatgattacttactaaaatcttccattacaccggatactatccctaaacattttcttgaatttatttggccccaccatgacaaaattgaattgctagctaaaaatgatctcttagttcctttgctaacaagacatattcaaaccattgtagcgcttctcctgaatgtaaatgtcccttggcgaaaaggcagtttgaataaccagcattatgagtacatgctaacgtactcaattggtgggttcggtgttctactggatacgctttttaagaagagtgctcccttatctccagatcaaattagcaaagctttaagcatggcattgaaagagattgctatccaagttgatatgaaataatataaaaaataccatacgttcaggatttctaactgacatttagcctctataactatatggtagattgtaaaattaatccgaacagcgtcggattaattttacaatctaccaattgcatgagtacaaaaggttggtagcaattaaaaaatgttcgataaataaggcggagtagcccgttaaggactactttttttggctataataatcatatactgcaaacaggaggtggcttgtattgactaaaagggagttattagtcccagaaatcacgacagaactaggggctcactgacaacgtgtgtatcgctcgataaaaggttgaggaatgtcaattactacggcgagcctactatcaagctggatagagagcattttattgtggtaggcatgtcgcggagatacaggtgccaaaaacgcgagtgagatagaaaaaaggtgtaaatgcttgatataaagccaaagcaagtcgatacaaagaagcgcatgtcagtacaaatgatacaggagaaaactgacaaagcattacagataaagagtttaagcaaggtagtgttgcagtacaaaaagtactggcggccaagggtcaacaaataaactagcacaacggggacttgaattttaattttttagggatacaataaaattatattgataagaggtgaatttaaatgaacaaatatgtcgaacttgatttagaacaattgcaacaaatctcaggcggtatgagtaaaaagcaatggtatcgtttaggagaacgtgtcggtcgtgtagcagtttttatcggtggaggattactttttaaataaaaatttttgcgtttctatactggtatgtgttatcgagaggtcggattctttatgaaaaaattaaaatcatttgaggtgctttctgatgaggaggctaaattgataattggcggcggacattgctatacggcggggtgtattcggcgtagagataagcctcggaattcagatagcttttttccgggattagcacatggtatttgtcaaggagttggtatttgcggatgaacccccttttttataaaaaaccatcgttttatgtgtttattttattttcactgttcttaggtatttcattggtatatcggagagattggtggattacaatccctcttgtactagtagttttaatacaaggatatagaacaattagataatcataaatataagttgctcttggtttcataggaatcccaaaagtatagtaaaaatggtacggtccgttactgaaattagtgattgtaatatttttaccatgctttttatatttatttaatgtatgtctgcaagttactttgatacggtgtagacgtgattctgtgaatggacgctaaaaatatgaccaattttttattgtaatctcttattgataatgaaagtgtcgatgtccagaaaactatagcagtacaagggaaggtttattatgaatcttagcaagaataataaggtgtggtatcttatttcgtgtttatttctgggacttctatttttagaaatccccacacagtcagtaaatgctagtacaagtaaaaaaccagaagaatccgatacagtaataacggtagttcagtataaaaaaaatatattaaaatcgaataaagtaggtgtttcgggtttatataaacttataacgaaaaagggtaatcatccattctacttattttttggctctgaggagtgtcaatattgtcgaaagttttcggtaacgttgaagaaatttatggcacaaaagagcactcaacctgtctattatgtagatgtaaataaatttggtgtgaacgctgattcgcatagtgttacttcgaaaaaagtcatttcatttattaatgatagagttaatctacattcaataccgacaattgttgccgttaataatacacacatcataaaaatatatcatgattcaaatactacacttaaacagttgacagaactaaacaagcgactaatttcaaaataggttgtaaaaatgaaaaagtgctctaagagtaaattaaagttgcttgtactgagttctaaaagatgaaaattagctttcgaaaatggagttacggtcagccccatttccaagaaagctttttttgaatcaattatcagcaaaatttaattccattatttgcacgttggcaggaggtggggacaatgtaaatacatacgaatttttgtgccaaatttaatgtataatcgcctcggaatattcatacggaaggtaacggtagaaactaaaacctgaacattaatcttcttcaactacttcagagagatacgttctgttaatctaacttatctatatgttgagattgtaaaaaagaaagttttttggtaacaatgttgaaggggtgatcaatggttattggctatacacaggtttctaagaatggtcaaaaattaaatcaccaaattgaccaactgttaacttatggcgacaacgacccgaattcgaccagttattaccactaattcgagcaaacgacgtcgtggttgtcgaaagtatttctcgtctcggacgcaacacgctcgatattttaaatcttatccaactgctccatcaaagacaggtcaagtttgtctccttaaaagaaaatatgggcacggcaaccgttacccgccgggcaatactacaaatgatgagtgtaaatgcggaattggaatgtaatttactggctatcgctttaaggaagggattgccgtagttggccacgggtgccacaagagaaaatgaagatcgctattcgaatgtaccggagtaatgagtattcggtgaaaaagattctggcagccaatcagatctcgactgggactttttattgtgaagtgaatcgcttgaagctcaaaaattttaagtaaaaagatgaacagtaagcgtaagtgatcttatgattattcgtcttcctaccgcgaccttttcgtatagatgttccattgacctcattaagggaaagcttatgataaaagttaacatcctatcacggactagttgcaactggtctttattgctgatatttatttttttatttacccggcgaatagatagattttaaaatacatcatcgttgaaattacaacggttatttataattggtaggcgttcgttagtcacagcggtgtttttgaatttctaatgattagtgattttgtaatcgatacttgcgaattgccataatcaatgacaacgtgttgagtaccaatgataaactgctgaggagcaaactcgtttttgtaatacgcatgagcggcctccattgattgaatttgttaattctagtttaccggtattacgcactaaaagatactaaaagcactaggtgattcgtgggttgtgcgatcagtggttaatcatttgacacggtctgttcggcctgggatagcgcgtccttgactgcggccttgatggcacggctcgatacagaagcgccggaaactgcatccacatcataagtgttagcagccaccatttttgccggcaattcggcaactgcctgaccaccaacttcaccagtctcatgttgttcaactacttcaacatgagttaattgttggtcaacatacgtgatacgaaccacaacttgcccaccaatgccatcatctgagcgccctaagtattggtgttcaccaactgtgatgtccggtgatgcttcagctagcaaatcattggcaccagtctgatgcaccgaagcactagtattcgcatccggcttagccactgctttttcatcgactaattgtgtcgtttcttccttaggtttagctgcattttcaccagcgatttttccaaaaatcaggcattcagctaaattaccgccaccttgatactgatttgcacaaataccgcccaattcacctgcaccatacaagtgcggaataggttgctgatttgcatctaaaatctctgcccggtcattacgacgtggtcccccttgggtattaagtacgttgtttgttaacttaagcgcataatatggcccaccatcaaatgcccgcatcgtatcaacctgccgattaaacgcgtagtcagtaccagactcgacaaaataattgaaatcatgaacggtcttggtaagtaccgtaccatcaacttccataactcgtgctaagtcgtttagagtagtggccttcacaactaaatcggtgagattattaatcggcgtatattgacttgctaacatctgttgatactgagtctcatcaaaaaccaggtatggatggacatttgtccgcggtactcgccacattccatgatcataaatgtgaccgtgccggttggcttcactctcatcaaaataccgactaccgtcatcagccaccgtaataacgctaccatggttaacttccggccagcctaaaatcaagcgaccacgttcaccttgtggtacggcaatcgaaagaccatgtaaaaatccgagtgattcataattttgcatgtgccaaaagtccgcgccaacttcttgggccatcttaataccagcacccttattaaacagcgtgcctaatggtgccaagtgctcagcaccaaggtagtcctggatggcttgttgattattttcaaaaccaccacatgctaggactacaccattggtagctcgaacattaactaaacgatgctgacgttcgatttggacaccgataattgtattcgtagtgggatcttgaatcagatgttgtgccggagcactaagccagacatcaatctgttgctgccgatctaacactttttgtcgaagaattttccacaaagctgcatcaaaaatgccatgatggacagttgtaaagtcataggattggactccatcaaattcaggaaactcatgaactgcactgtctaatgaaattggagaatcagcagctgtaaaatcatttttgacactcaccgggtcaacattgagatacttttgaacatagtcgcgcatattcgccatgcccgctacgaaagtatcaaccatactatcgtctaattgcatgggtgccgttaagttttgataatattttttaccctcatcgaaactatctaccgttcctaagagttgggcagaataacgggtattgcctccttcatgcccattcggcgctgcatcagtgagcaacaccttcgcatgtgcatccgccgcaaaccgcgctgctgtcgcctcggcaccaccaaagccaataactaccgtatcatattgataatcccatttaacctgattcatttttttgagcatgctgaccaccctttcaaaatccatttaacgtattctaaagcacaattaaaattgatatttaaatcacaaacagaatcattttttaactacatctgtattatataaccgctttcatttttatagaaataacaatctgattatctgttattacaaatgagtaatgggttatacttgattttaataagattaagcattaaaggtggcgatttcatggaaaataaattgttagtatttttagaagctattcaacagcacaatagtatgacgaaagctgcacaaagtttattcatcagtcagccgtacattagccgcacaattaaaagtgcggaaactcattttgggacccccttaatcgaccgcggccatcatccacttgaattaacttatgctggagaaagattactgacttatttgcaaagtgacgctcgtctccatcagcgaatgaacactgagcttaaagaaatcagtcaaaataagtatcaaagtatgacgattgggattacaccaccgatggctaatgcttggtttagtcaaacactacctgctttttatcaacgttttccgaacattcgcactaaaatactagaaatcacaacatcaaaagcagaaacgttgctagctagtcatcagctagacttttttattggcaaaacaattcatcaaactaacgtcaaaaccatccctttgcagacaatttctttgtatttagtcattccaaaaacagccggaatatatcagtccaatcaattttggcgaccgttcacccccaccattcttacaggaatgaccggtgagcctgtcatccgtgcagtcggtgaagctcgctttcaagaactggttgaccattactttgccgataaaggcattcaaacgattccactcattgaagtcgataactctcgctttgcactaagcttgacacttcaaggacttggtagcattgttctagccactgcaatgttggcaagactagccactgaaccagccaagtaccctatcaatgcgttcaaattaccaacaagcgagctcagccttgattttagtattgcctacttaccaagtcacgtgctagctaaaccgattgcttatctagtcgaacaagcttgtcaaacctttaaccctgcgattgatttttaacataaaacgcaaactgtcagcatctattaagctagatgattgacagtttgcgttttactttcaaaataaatcaccggtagtaaatcatgttcaaccccaccagctgttgcattagttgctcattttctggtgatagtttgatttgttgctgccgcagacatttggagatgtctaagttcattctgtcgaatactcccagtactgaaccagttcgttgttccaatagttcctgataataagttgccagcagctgtcgtaacggttgctcattcgtggtatttagattagcaactaaatcactaattatgcccacagcaacacgtgcccgatcctgccccccgctgtaccatttcaccgtcatatctgttcgactccttttacgcaataacaactgccaccatggtcgctgaacaggtcttctgctcaaacctaataactcatccgtcgagacagcaaatagtttgctcagtgctaccaacaactctaaatctggataacttttccctaactcccacttggaaatagtttgccgtgagacgtgtaaccgctccgccaccgtctgctgggaccattcatgctgttgtcgttgctcatttattttagtaccaatcacaattttcatcctacccgctcctctattaaaatactagactattgggtgcaccaattcattgcaacacacttaagcgctaccgcaacggttggttgcaaccactcaagatcaagtctcggtatgaaaatgttgatacaacgactttcctgaaactaacaattccacaacttgttgaggatcatcaaccgtcacaccttgtcgttgcaaataactgacaaattgcggtaaatagtcgctggccttcaacgcacattccagctgataagtttgggcattagtctttaaaatcaattgaaaataatccggattgaaatcaaatggtgaaagtcgtttgcgacaccgataactgatggtaacccgctgcagatctgtatagtggattagttggcaccgtggacaattgaacacaatttggcgaaacttcgtcaatgtcgatgcagcatacgtatgcaactcaacggtagcaggctgaatcacccagtaactattgattcccactggaacgaccacaatcaatccaacaatataaagtaataaaaagagccaccacggctgataaccaaaaccagtaaataatagacaaacaaatagccaaaataatccgagacccagaagtcgcccaaagcttagtcgtcgaccaacaatatatggttttggaaaaaaagcactaccacgaactaattcatccaaggatagattatacagatccgacagtgccagtaaattatcgattgacggaatcgcctttccgcgttcccacttagacaccgcctgagtcgtaacaaataacttggacgctaattgtgcctgtgtcaatccatactgacaacgacgcgttttcaataatgctgcgagtaacattggctcgccccctttatgatttcagcttaatcttcaaccacgatcaaaccaatcaactcatggttgtttagtcacaatcatgcatggcagtcataatttgttgaacttccgtggttaaatcttgttgctcgccaattaagacttcgttagcaacgcccaacgtatcatgtggaagccaccaccgacgcatgtcttccacaccaaaatcacgatgacgcttttgatgacgcgccaaggtcgtggcaaagctcacttcaaaataataagtaaggacgcgtggaaacgattgactaagccgcgccaacatttttccataccgatcacgtgctaagatgccttccacaatgactacaggcacacgtcccagcccataacacgcaatttattcaatcagaccaattgaaatatttcccgggtaatcatgactcatcagcatgtcgcgacgaacgacatcttgggacactagcaacgtatgatggcccacgcgtcgttgcaacgcctgcgctagcgtcgtcttgccactcccagaatttccccgaataatcaccaaagttgtttccatccacatgtcctccactcattcctgtatcttaatcataccgcacagctaacaaaaagcgttagccaaattggctaacgttcgctgatactatttggctttactggcgttacgtcgggcatcatgtaaaatcttcaatgcgcgtttccgcgattttaagttggtcccccgtagacgcctgcgcgcacttgctaaatcttgtttttccatcatgggtgcctcctgataaacagtaattattaccatttaaattataatcaatcttatgcttacgtcaactattatgcagccagctgacattgacagatacaattagctcccaataattaaattatcatttattagactaacggcaatgacaatgttacccttaaattgtcaacgacattatataagtattttgaaggagtggggatctttgaaaccaaacaatgttaataatcagaataaacgtcaccaatcgcgatgggtaatcacgagcgcaaccgccatgatactgacaacgttaacgattgccagtcaggcggcggctgccgacgatacagtcacgaccacaaccaacgaaccgaccaacagtcagttgaatacgaatactcaagttaacgctactcaggtcaatttgaaagcggatacttctacatcagtatccacgataaaatccgaccagtcagcagtcgcagccacgtcacccaccacatcaaccggaagtccctctgagcactcgtcgtcagtgaacaccaacccacaacaacaatcagcaaatccagcatcacaatctcaagcaactaccacgtcagaatcaacaccgaccacagatattaagcacccaactcaaaccgcaccagctcaaacagcctccgcatcaactactgaaccaactaccgaatcaaacactgaatcagcgactgatagtcaagctaaagcaacgacaaccgataatcaagcttccaagcaaccaagccagcaagccgtacccgcgtcgtccaactccactaccaccgaggtgaatactcagtcagcgactagctcagcgtcaaccgatgataaaattgttaccaatgtaaaccaggaaaagctggttttgaaaactaaccaaccagtcgtccgtgccattagccgcaccgcgtcagaaaatattaacgattggatgccgaacacgttattgcaacaagaggtactcagtcaactgcgcaaacagaacccagatcgtacctggaactcagctgcagacatcactaaggcagatatgctactactgaccacctactatggcaaggacacttatatcgacggcaagacttcctactcattagaaggactgcaatatgccactaaccttacgacagtctggctcaacaacaacttgaacgcaccgtctggcagttactatagtgatgtcactgatatttcaccattagccaacttacaaaaactccaagtggtcaatattcagcaaaaccggatcatggacatttcaccgctcgcaaacttaaagaatttaacggaggtcgatgccgcctataaccacatttcagatttttcgccacttaaaggatttaaaaatctgaaaggcacattcagtaaccaatttatcaccttaccacccgcctatattagtgcagataataatattgcgacgctggcgattgattgctatttgccagatggctctaaggttcaactgaagcccaataatggcgtcggtgaaactgttttctacaaaaacggtcagctttacgttcgctggtactttaacggtgcgggcggtggtaattacgacagcaacggtcatatctattacacgaatatgaagcctcagcaacccggaataacaggtccgaactttaacggtaccacggttattcccatggccgattattatttcatgaccgccgcttctgacggtaacaactttgtcgtcgtccgcccgtacgtcttagccgccactgctgcgcccatcacggtcaaatacgtcgacgcgcttaccggtgaatccttagtcaccaccgacctcaccttaaacggcatcgtcggtcagccttacacgactcaacgcattgatgacgacctaccaaattatgactttacgaacattgttggcaatgccagtggcgtcttcacggcggatgcccagaccgtcacttattactatactcgtaaggacgccggcgacattacgattcacatggtcgatactaacggcaacttagtctacgagccgcaaattctacctggaaaacacaatctcggtaacgcctacaatttagatgcgccaacctttgaccattttaaattacagcaaactatcggcaatgcggctggcgttttcaagactgatccgcaaagcatcacgtttgtctatgtccgcttagacgccggtaacattacggtgaaatatcaagataagcaaggaaaccaattaaaacccgataagacaatttccggctcccaatcactcggccaggcttatacgactgaaccgttggacattgaaaattacaccctgacgacaacgccgacaaacgccacgggcactttcacagaccaggaacagacggtcatttacgtctatgtgcgccgcgatgctggccagatcgttgttaagtatcaagatagtgctggtaacccactagcacccgacaagcttttagacggtaaagaacagctaggagcagcctatcaaacggaagccatttcaattcctaacttttacctagtcgccacacctgcgaacgccaccgggaccttttcaaccgacgcgcaaaccgttatttaccagtatgcacgttcgaatgccggccatatcacggtgaagtatcaagacgctaacggcacgaccttagctcccgacgacgtcttaactggtgacggtcagctcggtcgcccctatcagactagcgccaaggcgcttgaaaactaccgcttaattcaaacgccggcgaacgcaactggacaattcagcgaccaagcgcaaaccgtcatctacgtctacgctcgtgaagatgcgggcgatatcacggttcagtatttagacgaaaacggccagcagttagccgccgatagcgtattaagcggccaaggtcaattaggacaaccctatgaaacgtcgccgctgaacattaacggctatacggtaaaatcgacacaaggtaacacgactgggacctatactgtacagccgcaacgcgtcgtttacatttacgaacggacggctggacagtcggtcactgtcaagtatcaggaccaggatggtaagtctatccatcctgacgttgttctcagtggttatttgggtgacagctactcgactaaacagctggttatcgatggttacaccttcaaggctgtgcagggtgacgtcagtgggacgttcggaactaccacgaagactgtgacctacgtttacactgaaaacacccccacgattccagatacccaaggaaccgttacggtgcattacgtgaccaaggacggcattaaactaaacgaaccaaccgtgctgagcggcaagacgggaaccacttatcaaaccgtgcccctgacgttcactgatcatgaactcgttggtcagccggaaaatgccacgggtctcttcactgctgataacgtggacgtcacgtacgtctaccaagcaactgacacgactggtaccgacgatattattgatcccgaagaaccggaacaaccgactaagccggttgagccaaccacacccgagacgcctaacgaaccaggaacgaccgtaacgcagccggatcgtattaaaccgactcaaccagcggtagctgtaaaaccagcagcgaccgtggtattatgctggcacaacaatgcgcccagcagccgttatttgcacaagtccaattaattctgtcgtcaccctacacgcgtgccttacaaacggcactggaaatcgtgcgttttaatgatattccactaaaggtcgaccttggattacacgagtggctgcccgataacacgggtagtcggactgataccgatgaacaagcggccacggcctacaagctctatcgccaacacgccggcaaacgcaccaccgctagtcccctcccttacgaatcggcagctgaaatgaagacccgagttttggcaactttgaataagtatgccgcatcttacgattgcatcgcctgcgtcacgcacggcgaggtcatgcggcagtttggcgatcagaaagacgtggattattgtggtgtgcgtgttattgcggttgattaggtagttagggaaacattacttcatttgctatggttaaccagattatgagctagtcaacttggcatttttgcttggcttgcgaattggtatttttcaaaactgcttctacggttgttattcaaataatgcagaagcacccacaaatcagcataattatttttaatcttgataattatactagtattaaaccaaatgtggcataattattgatttatactctccgggtgcctgaagccaactttcaaactgtacttaagatgattattttatctcatttcactcacgctaaatgccccatatctaatcataaccattagtttaaatgcaatgaattagctagaaaattctttactattttaatgactaactttgggacttgctcattggcagcgataaggttacatatgttctttaataaagcaatgattttctgttgttcagagataactggataccatacttctatatttgaaagatctctcaggtatatacctggttgcgccgaaatagatgttactctttgcaatattttttttatggtaggcaattgaaagctaaacatcaaaaaataattatctataatttcttcttttccacgtattatggctactgaacgttgaaaagcgattttatctttggactgtctataaatggctgtgcgccctatagttccaacaatagtcaaaagaaaatccccatcatttaatgaataccctttgtatattttattaaaatcgttaatactaatttgtcgatcatttttactgtagacaatcctatttgataggatattttttgcgcttaacaggtaagctccatagtgctcaatatgtgtaccatgtgtaccatccttaattacactagttatctcttttagcttacgctgctcccaagtaccagttcctaatatatgaccgataagcctgaaaacttgggagcagcgtaagctaaagaatatcgccataagagttcggggaaatgacggaagaatggaattaccaactctcacaatttcggctacacaaggatggctgaatcagaaagatcgattttctgaaaatatcgctggaaaagaacaaaaaaactatactttattaaaaaagggacaattgtcatataatcatggaaattctaaaactgcaaagtatggtgcggtattcaagcttgatatctatacagaagcattagttccacgtgtttatcatagctttacagttaaacataataattcggcagatttcattgagtatttgtttgcaacaggaagtccaaatcgtgaattgagaaaattagtttcatctggtgcaagaatggatggattgttaaacattagttttgatgcgtttttcaatattaatttacaagtaccaattgcaactgaacaaatgaaaatagctaagttttttagaaaaacagataaccttatcgctgccaatgagtataatctgaaaaacgccctcaacattcgaggacgtttgaatctgcacttattaacgtaaatcctattgtctatattaggcttgctaaatgtttcatgaccttgtcgttatcctggttttctaattcttgaataatgtgtaaataagtttgctgtgtagtcgtcatattagaatgacctaaccgtcgagctactgaggcgatactaacaccagcatacaataataatgaagcatgtgtatgtcgcaaaccatggactgaaatcacaggaatagatgcgtgcttacataaacgctccaaataatgattaaccgtatcattataaacttttgcttgaacaaaaattggttgatcttcgggcagctttttagtcaactgggaaaattgaatcacagtctgccaatccagcggtactttacggactgatgagttatttttggtaggtgcgaagtcacttttggcagatttataatcccaagttttactaattgaaagtgtttggtgagcaaaatcgaaatcagcaggagtaacacctaaggcttctgcaaaacgaattccagtcttagcaatcagcaagatgaagtagtcccaattgacttcgttgttcaggtttaattcatttaacaatgcctgcaactcatactgatgtagatactttgttttatgctgacgatgcttaattcccttgataattgctttccgtgtcgggtcgcgatcgataaacccttcttccaacgcatcaataagtgaaccttttaaatgacgatgaaagtccattgtcgtttgccgttcatgggtttccgcataatcattgagcaattgctgatatgtcagccttgataaatcagccatctttagatccggcgctaacgttaccaattgccgatgtgacatttcatatttgcgataagtcactggacggaccgcatctaatttatagagctgcatccactgaaaaaaatactgatgaaacttaacatgctgtgccataagaaacctccaaaaaatgagttaacaaccacttgtgcagccgctaactcatttatacatgaataattattcatttggctaaaattgacacttacaaataaattaatactatcgctattcagcagggatagcccgtaaaaaatccataaatttaaacaaacatattttgcattaaatatttcttcaactttttgagttgatttagtttatcttcattggcagcgataaggctgtctattttaaatatggataatcctactttagactgttcgtcaataattggaaccagcaaagaagcattggctaattttgaactgctaatcgcaggatagctagttccagtggataaagtaagtattcgattaacaaacggcgtagtctgtaatgcataaaatagatatcttatatcttgcttggttctaatttgtgtataccctgttgaaaaaacaacgttatttttgtttgtcaaaaaaagcaagttatttttttgatatggtcttacattttggaaaaaaatatcgcctttttttgctaatcgttgtgccctagatggcgcatcatcttttgtcactgctttatactgtgtgactctattttgacttactgattccaaatccacataaagaaaatgcggagaaataactgacttcggattaatggtcgcaatctgacaaagcttacgctgctcccatgggtcagtgaatcccttgaagcgccattcctgagaaaaaatcttttgcatcatcaactttttgagagtttttaactgttctagtttatcctcattggcagcgataaggttgtcggttttatcaaaaatacgagctatcatactttgatttcttttgctgggatattttaatactacttgtttcaaatcagagttgtgcaaatgaactatagattttccctgtgcccttttaattagctctttgttttgctgaccattagaaatacaaagtgccagaaaagaactatcaataatgtttattttgggcttaattatattaaggtctcctcccaagacagccccagagatacatacatgcgacgctctggcaatgtcttcggctgtctcaccggaagcaggtacaataacatcattacattcgctaaaaacagaaccaggacgtactttcacaaaagtatcttttatagtagtaatattcacctgataatttgtatataaccgaccatataagacaataggtgtaccttgatctataatatctttcttcgaatagccggctcccttcgaaaagtcagctaataatttcaacttacgctgctcccaagggtcactaaagcccttaaaccgcacttttggcactaaattttcgtttttcattgtaacatcctcttaatggcctcaagctgctgttgagcgacagggtcagtcgccactaagtcggccatcattccggataattcagattgtaggtcgttgattttggcatccgcttcgcccatttccttaaccaacttatccacatcaacaggtggttcctcttcgaatgtatcgacgtatcgcggaatgtttaagttatactcgttttccacaatctcagctacttctgcaccatgagcatacttatccacatcttcacgtttttcaagggtttccaaaatcttatcgacattttcgtccgttaggttgttttggttcttacccttttcaaaatcattagacgcgtcaataaagaagatatcctgacgttcgcgacctttcttgaagaccaatacaacggtcggaatactagttccgtagaataagttcgctggtaatccgatgacggcatctaagacgttgtcatgttcaatcatgtactgtcggatctttccttccgcagcaccgcggaataagacaccatgtggtaatacaactgccatcgtgccttcattatttaagtgatagagcatgtgctcaacaaacgcaaaatccgccttcgacttcggtgccgtcttcccatatttccgaaaacgttcatcatctaatttatcatctggattccacttagccgaataaggtggattggcaacgacagcgtcaaaagttagatcatcaaagtgatcttcctctaaagtatcgccttgacgtaaatcaaaccgattataactaacctcatgcatcaacaagttcatccgcgccaagttgtaagtcgtaccgttgatttcttgaccatagtagtttccaatcgttgcgtaattacccaattgtaataacagcgacccggagcccatcgtaggatcataaaccgtcttcaaacgatctttaccggccgtaacaattcttgccaataacttagaaacttgttgtggcgtataaaattcgcctgcctttttcccagccgaagcggcaaattgaccgatcaaatattcgtaggcatcacccaaaatatcaattttaatatcttgttcaccaaaatcaatattcgacaaggatagaatcactttggcaatcagttcactacgcttggcaactgtatttcctaaccgtgatgactgcaaatccaagtcttcgaatagccctttaaagtcattttctgactctttgcctaaagtcgaattctggacttcgttgatggcattttgtaacatttcaacgtcaaaatcgccagcgttaatcttcttgaccatagttgtaaacagatatcgtggttcaatgaagaaacctaagacgtcaatcacttcatccttcaaatcttgcatcaggtcagcatcttgttccgcatctgcaaagtcaacatcatcgtcttgaagtaactcatttgcgtaattttcaactttttcagacaaaaagcgataaaagattaatcctaagatatagtttcgatactcactggcatccatgttaccgcgcagatcatttgccacagcccataatcttttttgtagttcagcctgttgttcggcctgttcaatatgactcattaaattcattctcctagcttagtgaatactttcggtcgatagtcgatacaaaatccttaatctcgcatttggcctgccgtttctctcgaaagccgagcccattagcacttaacttgtcaataatctctttgtccttggtcttaccgtagaagttgtagtcagaaatctgctcgttaacgaagtcttccgaaaggtggtgttcttgtgaaaagcccttaatggcagctcgctggctctcggccataaagttactcaacgacatgccgatatcatcgtctgtatcgagcgttggcaaaacttcattcaaaaattgttccaacaattcaaccttcgactttaattggtcattggtcgcattatccaacaaatgttcaattttctgaatatcttgcttacgttcggtcgacgacattaagtcaatgcctgagattaagttcacaatatagtcaacattgatggtatcagtctccaatagactgatatcaaagtcaacgtcatctaatattgagacgcgctcctgcgttttacgttggtaaatcgtttgataagccgtaaaatatttgcccccgaaggcttccatcagctgatccgaaaattcaggttcatattgcgcccattcaaaatcatcatacacgcgaatacgattatatacccggaggaccgcccgaaacgccatcacaaactcatatagtgcgtcatcgcctcggttatagaggtcgtccactgactggacatctggagtcaccgtcagtaattggccaatcttgtcagtaaattcagcttttaattcatcataatctggtgctaagaagccggaactgtccccgtctgaaaacaacgctacagcctcatccgtcttatttttgatatttcgataagcaataatatttccgaatggtttttgtttgccctcaacacgattggttcgagaaaatgcttggattaaaccgtgccattgcaaatttttatccacgtatagtgtggacaaccgtttggagtcaaacccggttaggaacatgttcacaacaatcaaaatatcaatattatccgtcggcgtttggtcattatgatcgcgcatccgcttagaaacatccgcaaaataatctttgaatttatccgttgaaaaatccgtaccgtacatttgattatagtccttcacgacttgatctaatcccatccgtgaagtgacatcatcctgtttttggtgttcctcgttgtcgtcctcattggcagcccacgtaaagattgtcgtgaccttcaaattatgatcaggatccaactttctaaacaactgatagtactttaaagccatgcgcgtattcgctaccgtaaagattgcattgtaatgcttattctttgtaatgtggctatggttcaacaggatatgctcaacaatcttggtcaatcgctcctcggactcatagacctcttgcgtatcaattcctggtacttgttcgtctgtaatgtcatgatcagtctcctcaaaggtcgacagatactgaatcgaaaaaccaagcacgttaccatcacgaactgcatcacgaatcaagtattgatgcaactgattctcgtacagatcttttgtggtccgcccatcgggtcccatattctgttgaaaaatcggggttccagtgaacccaaagtgttgggcattcttaaaccaatgattcacgttttttcgcatttcgcccatctggctacgatggctttcatcttcaatgaagatcactttgcggtcatggtacggtgtcagaatatctttataccgatcattagagaccgcattattcatcttctgaatggtcgtcacgattaagccattatcattagaggacagctgcttgactaatgcagcagtattgtcagtccgatccaagggactctggcccccagttgtttcaggcagataggcactaaaattctttaccgtctgaatatccaagtcggcacggtcaatcatgaagataaccttttcagcatcagtttcttgtaataacaactgactggccttaaaggaggtaatcgtcttaccggaacccgtcgtgtgccacacataaccattttcatgggggtgatcgatagcttgcttaataattgcctcagtggcatatatttgataaggccgcattaataacattttatggtcactactatcgaacaccgtatattttgcgattaaactatgtaaccgtggtttactcaagaaagtggtcgtaaaagcgtccaagtcattcaaccaattattatgttcatccgtccagtagaacatgaagtttgaatttaactcaccatcgccattcgcaaaataccgcgtttcattgccattggaaatgacaaatacctgaaccagtcgcatgagttttgcttgtgcgtacgattcagttcggtagcgaataatttgattaaaagcctgagtaaattcaaccccttgccgcttcaactcaatttgggcaattggcatcccgttgatcaagatcagcacatcatagcggttctcatgacgaccttcaaccgtcatttgatggctaacttcaaaaatattctgatcaaattgttttccattaaaaatttctaggtataagctgctatcatcatcacgtttaatattaattttcccagttggctgaacaaccgaaccacgtaaaatttgggcaacttgataatgcgtcttagcgccaatcaaatcatttaatacggcctgaaattcacggtcactcagtggtgttccctttaaacgttcttgattacgttcactcaagaccgcacgaaaatgtgtgtttagcgtttcaacatcgggaatttcaacgtaatgatagccaatgctttgtaactttcgaatgaggtgattttctaattctgcctcagattgatgtccacttgccatcataggtcctcccatctatacgactattaattagccgtaatactaatcaagtctactctccataattaccaatatcatatcatatttaactgacgctgtaggccagtgttagttatttctatcaattattaaatcattggcaataaattaaacatggtttgattgcaaactaaaaaggtagcccgcgctgaaacgtccagcaccgaactacctttataacgaatattaacttattttacaacttccgcgaccgctgcattcaccgcatcacgttcatcctcaactaaggcaacgcgactggcgattaccttcgtatccatcttaatttcacgcgttaaaccaggcgtattgatttttggttcaaagaacgccttgaattctgctaaacgttcagccgtatggaagacccgtgaaatgacggtgatgtaagtggtaaattccatgtcaccaccaaccgtggcttccaaccatgaccattcgtcgcgaatccaatcccaagctgcttgttcaccagctggattagccaagacgccgcggaaccaggcccgcaagtcttgtggcttaatcgtatccgcatcttcaaacttcacaactaactgtttgattaatttggggtccgtagttgcggtcaatgcgtcacaaatgtcagccttgtaactagcatcagctgtctgccgtgacgccgtcaataaactatcgaataagtccttgctaccaaagttcttgacttcattccgtaaaatgaagacccgcacatcggctggtaaggtcgctaacttatcacggttaccttcgaataattcatgggcagccaatacggccgcactattcttggcgtacaaagccgcactcaaaacgtatggccgcgtcaactgatcatcgttagattcaccagcttgtggcaaccaccctaaccgtttaacctgagcggcactcaattggtcaaataacgtttgtaaatgcttttcttcatcagaatctggcgtaacaaacttacgtaagttacccgcaacttggtacaacgctgcattaacgaccgttgaatggctggctgcaaaccggcttaataatggcacaacggctgcgtatgagatttgacgaccttcagctaacaagcgtaagtcttgtaacaactgtaactggtcaatagccgttaagtcatcaacatgcgctagaatatcatccaataacgtttggtcatacttgacgatgaagtgggagttattcccaacattcaagcggaatggttgcccactcgcatcacgtaatttggcataatcgccgaccgtcacagcttggtccttcataatcgctggtgccgcctcatagttgctattcaacggaatctgccattgacgaccgacttcttcaccttcaccgatgaagaactgttgttgtgacaaggtcaactgaccgtcaacaaccgctgccgtgaccactggatagccaggttgttccagccatgaatgcatgatgtccccaacttgcatcccagaagcatccgctaaggcgttccacaagtcatcacctttggcattaccatatttatgattgataaagtactgcttcaaacctgctcgtaaggcatcatcaccaactaaggcccgcgccattactaacatccgcgcacccttagcgtagacaatcgcaccgtcaaaaatcgagtcgatttcggccggatcttccacctgaacgtggactgactgaaccccatccgtggcatcccgttgaagcgccattgatgcttcggacgtttggaaagtttcccaaatatgccagtctggttctaaggcatccgtcgccacatattccatcatgttggcgaaactttcatttaaccagaggtcatcccaccacttcatcgtaaccaaatcaccgaaccattgatgggcaagttcatgggcaatcaccgtggcgacccgttgtttcgtttcgagggccgtgttgtcaggatctaatagtaagtaggcttcccgataagtaactaagccccagttttccatcgcaccagctgagaagtctggtaaggccaattgccatgagtgtggcaatggatatggcgtctgataaaaatcttcataaaattcgattgagcgcttagcaatgtccagagcaaagtcgagctcgttagccttgtgggccttagtaccgaaaacaccgatggtcacgccactcttggtcttcgtctgcttgccttgtaattcaccaaaggcaaacgcaatcaagtaagtcgacatccgcaccgtggtttcaaagtaatgcaccccatcggcttcatgatcttcgggcatgttgcttaagattgtttcaccatcatgttcatcgtacttgatggcaagatcaaaagtcgctttagcttctggttcatcgacacacggaaaggcttgccgggccgcggtcgtttcaaactgcgtcccgattagttctttcttcacaccgttgacttcgtaatatgatgggtagatacccatcatcgtgtccgtcaatttggcgctgtacgtaatcgtcaaagttgtttgaccggccttggcaagttcaattcgaattccttgaatcgcatcatccacagtaaagggcacgtccgcaccatcggcttggacaccagcaatggtcaaaccattctgatgaatcagcacttcctgcgccttagcatccccggtaatcgttgacttccccgaaatcagcttatccgcccggttaatattgatataaagatcgtaatgttctggttgaaatgtttcgtaaaaatgagttgtggttgccatattattctcctcgttttttaagaatatattcattatacgacaattgcgggtggaatgcgtcctctgccgcccatgaatttgtcacgcgcctagcaactaattctcgacaacccccatcactaatgatgacacggttccttgcaccgtacgatatcgataatcattagtgtaaacgacgatattacgccgcttgtctaaagtcatcaataatttcttcaaactccgcatccgacaacaccggctgccacttcagcgactgacccaccggctccaacatgatgtagcgacagctatagcggcgttcgaattggaccgtggtcggcaataattcaacatggcgcgtgtcgtcttgaatccaggctgtgggcaaccaactggtcacgcgactagcatcgacacttaactcttgcaactgttcggcaaaccttgtccgcatcagtaacggcgcgtccattggcgaaccggccacgtcaatggcaacttgaaaatggccgacgtatagcgctcccaaatcataaatcaaacgttcatgcttatgtagcgcaattgcaccggtgactggttgccacgtagctgtcgctaaggtagcctgattgatcttggtgaccaccaaataacggcgtggctgaatggtacgggtagttagtggtactgatatatttgcctttgtcagtaatttaggattggcagtaaaacattggtcagtaagcttatgaaacttgtgatcatcttcattactaaaagtaactgtcattttttaaccccatctctatccgtctaagttgctaccgaataccatcttccaaaatctaatcatgaaccagtacgcgacctttcactcgtcagcttaacgttcgtattaagccgcttctggctcccagcgttcaaaagcgccaatcagattctcagtcatctgtaactcgcccatcacgttgactaatgccgactgggcattcataaagagtgtcgagtgcacaaaccgttgagccttggcattctcgatcagtcggcgtacctgtaaccgctgggccgttagcaattcagtttcggcctgacgtaatttttcacgtgccgcctcgtagcgataggccgcaatctcggctaaggcagccgcaatcattgaccgggcgctgccgattttcaaaatcatcgtcatcgtaaggttgagcgtgtgttccgtatttttctgcatgtctacaccttttttctttgtatttcctactctttgaccaatcgtacacacttgtgttgacggtaatcttcatcatcgcgccattcccccaaatgacagcaatcatgatcgacaatcagctttaaaatgtcgtgccgttcacatgaatgcgccggccgttagatgtcttgacaccgttaacttatgtcatagtatagcattatttttagaaaacaattccgactttttcaatatatacataaactttacaaaatgaaaaccggggcaatttacgtgcatttgtcccggcttttatattaatattatattttcacagtgattaatttatccctgcccgcactaccgatcatgacaccctcgattaatctaatgagtcagcggccggactggtctttgattcatctccatattgccagtcacgcatttgatttgccgcggctgctgaaggataggcgttattatcgaaccaggccccagcaccactagcattcattaagactggaatttggcggccatcaaaataatgataacgcacgtattcaaagttaccggccccagcagtctgctcggcccccataatatgaatccatttttgtccctcagctgccacataagatagcttcaacccgtcggtatcattttgcgtcatcgaattaatcttgtgatcgtacttattatagtaataccaagtcccctgataactttgaggccattgattagccttcgcatcacgactcatgttcacgttcagcgcactatctgtcagcgtcgtcggtcgactgcccgtaatgatcttggcaaagccggcttgcaaagcactgttctgcgtgtcatgaatgatcaactcgtccccgttggtcgtctgagtcacaaagacgactggtcgccgatgatggaggcaaaagaagtacgtgtttggatattgtgcttccgccttaccacccgttgcgacggccaccacttgaaattcactacggtcttcgccgtccttggaccacttgagatccactgactgcgagccccacttgattcggcctgctaagctaccattaagcaaagcattgggaaaacgaaaacctaaatggtcaggaaccttgtcatcatacgtcccgacataggtctggcccatctcgcgttgccaagcggccataaacgttgataaagccgcttgcttgcccgtattccacaaggttgcctcagccggtgatgaagaatcactgctagcggtacttttttggctagcagcctgctttgccgctaccttggttgacgttgctttttgactcgtcttgggcgctgacgacttgggcgacgtcgtgcatcccgctaataataaacttcctaataataatccgacccacacttttttcatgttgctcctcaccggtcccgtaccggtatccccctattcaataattacttttatggtaccaaaaaaagtcggcattgtgctgggcgttacaatataaatcttcacccatctcacttaccgactatggctatttacttaatcgtgatatttaacgtccctaaatgtgtaatctgaccgcacagttgatcgccggcttgcaaaaagacttggggattgcgaccaacgccggtcccactaggcgtcccggtaaaaatcaaatcacctggttgtaactcacagaccgtcgacaagtagtgcaccaaatccggtaccttgaagatcagttggctcaacggcgcttgctgcatcgtctgaccattgacggtggtcgtgatcacctcatcgtctaagttagctaactcatcgacggtcgttaaccacggcccaactggtgcgtaattttcaaacgatttacctattgaaaactgtggattatcattctcgaactgaacggctcgatcagataagtcttcaccaaccatcactccggccacgtgcgccattgcatcagccgtcgcgatatcgcgcccacccttgccaatcatcacgactagctcggtttcccagtcggtctcaggaccatgcgtcgccacggtcacgttcgctggtgccagtgaactactaaacttcgtaaaaatacttggaaccttcggcagcgtaatgtggatctccgccgaatggtcgcggtagttcatccccaccgcaaaaatctgtcgcggggccgtgattggtgccgctaattcttgcggcgcaaacgtttcaagcgagccaagttgccggtccgctgctggcatatgtagcgcttccaaaactgtcttcgcatttaaaactgtttgtccatgctgttcatccgtaatgataaacggtcggttggcccgcatgccaatttccatattaatcacctcattaatattattgtacactcatctcatgaatcataacaataatgatagttgcgtgacggtcattccggacaatcttcatgaacgttcaaacgcaattacgaacttagttcaggatacttcttcatgtaacgctcatcactaaaaaaggtacccgcctaatttgcgagtacctttaaccattacggcttccattaatgtgggccgtcatcctttggttctggatgtttcttttctggtgctttttcttgcttgtcattttgttgccgccactcttctgtcgttaacatgtctttaacgactaattttaacttagtcacttgataaccagtcattgatttaacggccttggcaaccttatccgccacccgtgctagaatctcctgaccattcttaccataagctagaatggccgtcaattcgattccaaccgtctggtcatcgtcatcggtatccactgaaacaccggtctgcgggcgatccttatccgtaaagcgattggaaatatcatcaatcagatttccctgtaagctcaatactccttcaacttcttgggccgtgttactagcaatctttgccaataccgtatcgtcaaaaacaacttctggttttaaagatgtcgctgttgcttccatcaaaattcctccttgttttgtcaaaaatcgtcttaccaatgactactctaaacgaccgtgctattcaacttgccgcttatctgttgattgatccgtatttggtttgccagtggcctgatcttgccaatcacgcttgctcatgacgtcactgacatgtaccttaatttcaatgaccttcaagccagtataccgttcaacatcttgctgaacacgttgacaaatttgattgaagatttgtcgcatgtccttaccatattcaacgatcatcgtcatatctaaagcaacttgtttcttaccaacttgggcgtcaaccccctgcgtcgggtcagcttcatcacgaaagcggttcgttaaattgcttaacatgccgccttctagggataacacgccgtcaacattgcgtgaagctagaccggcgattttttcaatcacaccgtcatcaaacgtcaattgagtctgtaattgttgttctggttgtgccattgtaattcctcccattatttagataaatactcactcaacttctgactaactgcagccaaatcgacgtggacaaaccgtccaatcgcccagccgatcagccctaaaactgcgactaataagactgccgaaaaactggttaatacccagacgatacctaaaagcagtccaatcagaaaaccatactgtgcgttactcatcaggaccctcctttacaccacggttaacttacgctggtgatttgctggcttaacttgcactactggttgttcgaccgtcaatcccaattgattcttcaaatagtcctgtgccaaggttgccgcctgttgggccgtggtttctaacgatgcgtcagtattaaccatcgcatcaatttttactcgtacccggcgacgacgccgtaatttcaagtgaacctcaggatcaatcagattcaactgattaacgagtcggtactgcaaatcacgttccaaagcccgttgcggaatcgttaactggccaaccttgccatcatacgtcaacgtgctgactttaactggtcgaaacaagccaacaattatcaataagataccaacgattccggcaataatggcaaagaccatcaataagatactccaaaccattgggtagttaatcgtcagatcagctaaccaggacgtcaaccacgggatcgggtacaactgacccagttcaaaaaccgctaataacaccaatacaattccgactaacgtcaccgtaaacttagctaagcggctcatctaatcaccgcctaacgtttcttacgcatgccgaagattgcagaaacgattaatactaagataatagcgcctaagattgagggtaccaatgccataccagctaacgaaggtccccaagttccaagcaatgcttgaccaatccaggcaccaactaaaccggcaataatattgccaatgatccccattggaacgtcacggctggtaatcgcacctgctaacgcaccaatgacaccaccaacaattaatgaccatagccatcctaacattctaatcactccttacagttatatttgagtacatgcttatgataaccataatttaattttgggacaattaatatgcacactggtcgaattgtcacttaaaatctgaacaattaccatcaacgaatcccgccgcttcgcaatttaaccacaaacataaaaaaatcagcctgccaattgttacatcgcaagctgattatttctattaaattgactactaataactgctctgacttagctagattaggctggtttagccggagtctgtttggctgccgtcaatgcttgattgattaccttggcgtataaaatatcaccagcccgaatgccaccgaagtgtacgccatccgtccctttgaaaacttctggatgttgcgccgcaatcttgccccagtcggcaaccgtaatgaacttatacttagctggcagacgccgttccaaaacggccaactttgatgaattccagtcagcatcggcccgggcattataaggtgtcatcagaatcaacttgtgccccggctccaagtcatgaatgatcttcatggtttgttcttcgtaatcatccagcgcgttggtcccaatacaaatcaccacgtactgccgtaacgtatggcttcgctgctggttcatcatgactttatatgccaggttcatcgtccgatcgccctccgcatcaatattgctgttcgcgacgtgatcgcccaggtagctccgcgtccccagcgtgacactgtcaccaataatggaaacacctggtgctttttcttggtcacctttaggcgttgcctgcttcttcttgggcgttacggccgcgagcacagcttcatgagtcgttccgattttatcaatatcttggtaaatcccgctcacccataaattctgttccagtgtcgaaagttgcggtgcatttttgactacgaccccggtattaactgccaacaatactcctgcggtgataacgggtaactgcaactgtcgccacgtcactgtatgaccgaaaacgtgggcgcgtttgcccgcaattactggttctaacacgtagtatgacagcgcggataagataatcgacagtaccgtcgtgagcagtgccgccaaccagttgaccatcatgtgtgaaaaaatcacgtacaacggccagtgatagagatacacgctatagctcacatccgctaagaacgtcatccaccgcggttccttgaggttcggcgtgtggtcatgcaacaaccgggcgccatagatcatgatgccagcgagtacagtagccagtaacagcccatcctgatacgtttgtagcgcatcgaacttcatccggtcgcctaaagcaactaacaagataaaactaataagcatcaccgcgcccgcaatgatcggattgcagtgcgccgtggtccaacgatagattggcccttgagccttgatgccgctcaggacaccgataagcccgccgacaaagaacggaaaacagtgggtcagacttgaaaagtagactggtgaaaagtcctttaagccgaccgcaccaaagtacatcatgacaaagctttcaatcgcaaaggcagtggtcaacagccctaagccccagcgaaaacgggtcaatgcgcgccgaccactcgccaaccgccgactgattttagcgaccaaccacgcaatcaggccccataaaatataaaagtgcatttcaaccgctaatgaccacgtatggacaaataagtgcggaataaacttgttttcataactgccacccgtcgcaatttcaaaataattagtcgtaaatccgagagccgccgcgacctgcttaccaatgtcggtcacaaaatcgtggtcaatcaagtaagttagcggtagcaccaataacaccgcaataaataatggtggcacaattcgataaaaccggcgaccatagaaagccattagtttaaagttatccgaacgagcaaactcgtccaccattaatgacgtaatcaaaaaccctgagaaggtaaagaagatgtccaccccgataaagccaccagtaaactgggtttggaaaaagtgatacgtcaataccagcacgagtcccgttatccgtactaaactaaaccatttaatccgcattttctaacttaccgtcccccgtaatttttttggcataagtcttgttgccgacccgcagtttgaccacaccattcaacgcacccttgctgaagttgccttgcaaacgccacccgttcggtgcaatgaattcgcctgggccttcaaaccggccattggtaaaattacccacgtagcgcccctgtttgttaacctgcaacgtaccctgaccgtcaaacttgtgcttcaaaacggctccgctgtagctcatccgtccgtgatccaattgcacactttgctgcttcgccgttgatggtgctagactgataacggcaaaagtgacaataccgataatcgtgataatttcaaagaccattctgctactgatttttcccatacctctattcctttcacaaccttaattccccttaaagcaatcggcagttagccaccctggatttcccaatcatccacgggattatacggacacattatgtaccatggctgtcaattgcaactctgcatttaataacggatcatttttcattccgttaattatccattaatttaattcgtttatttaaataatcaaaaaaacttcaatggccgtattacttaatatattactaaatattagccttgccgtgtacaaaatatcaaaaatgagttgtcttttattgttaataccggttatgtttaattcactaaacttaatatctaaccactaaaaaaacagtcaggccaaggatttcggctgattgacaaccataggtaagcattcattgcctatctatcattcccggtatccatcggctatcctaatccaactgtttttattatttcatatgatcaataattctaaaaagctttgagctcagaaattaagcgcgtttgcgtaactttgttaaacccaataatgagaaccctgccgctagtaatcccaccacagtcaaactcgctgactgtttttcatccgtttgtggtaacgccgtggcctttgcggcagctggctgttgtttggcgcccgcaaccagcttcattgttgcattgccatctgaaacatctgcgctagtactcgtggcattagcggtatctttgctattcgctacggtttcagtcgcggttgcatgtggtgcagtaacaccagccgattgagcaacacttgtggtttcaacaattccatcagccacagccgtcgtcgttgtaaatttgttagcttcgacgcgtgccaagaaggctttagcagccgttaaatctccttgtgcgacggcgaaatcaactctggcagcgccaagcacttgtttaagttgtgctaaatcggcctttttacgatctagctgcgctttcccggcagcaagccgatcgtttgctgtatcgacttgagcctgcccctgcgcgagcatggccttggcaacagcgatttgttgttcagccgtagcaatttgggccttcatgcttgcaatccgcgcgggcagggccgcgatttcggccgccaatcgggcgttttcagcggtcaaatcggctaccaatgtcttggcactggctaagtttttagcggcttgcgtggtagttacttgcgccgcagccgtcttcgcgattgctgtcttcaaattacgaacgggcgatagttgttgctgttgcgccattgctaattgcccttgagcttgcgtcaaagcaacattagccgctgtcaaactagttgcagcgacttgaacttgggcctgtttagtcgtaacagtcgcttgtaagccacttgtctggttttgtaaagcttgtaaactggcattttggttagccagcgtggttgctaatgtcttcccggtattttgtaaaccattcaaactagccgttgcagcaatcaacgttgcgttagccgccgcaatcttcttcggatcagcgggggccgtctggacgtaattgaacgtgacagctggtaaggccttagtcccagtagcggcattcgcatgggcattgtcgaacaaatcaacatacttgtcttgctgtgcttccgtcatcccggcattatcgacttcaaatgccgccacgtgtttggccaagttgatggctactccggcatcaccagtcgagtatattaggttgacgcggtgaccaaaggaaccggactcaatgttattggattcatcataccaacccatcacagcattataggccgtttcttgatcgctcatgaaccattgcggataaacttgtgttaaattttctgcataacttgagctagtatgatccaagccaccgtcgtcttgggcagctgctcgcgcaatcgcattattttgcaacgtcgccgtctgtttcaatgctggttgaccattcagcgcccgtagctgattgatatattcaaacatatactgattgattttatccgcattaggcacatacttgccattacttggataggcgacgctgactgtttcggccccagtcaattgagattgtgggaattcggcagcgtcatacttattttgcgattccgtcgtggtcgttggccgttctgctgccgctaaagctgcttgagctgcggtcactttggcttgcgctgtggaaacagcttgattattcgcattaatttgactggtcgtattttgaatcgctgtcttggcagaattgattgcctgggtatttttattaaccgcatcttgcgctgatgctacggccactttagcttgatttgcttgggtggccgctttttgctgggcggcagatgcttggtcaaccgtcgcctgtttagcggcagtgacggcactggctgcatcggcatcagattgggccgtggcctgttcagttttagcttgcgtcaaggccgtgtcagccgcgtccttagccgtttgtgctttcttctcggtagctggctggttggcgatagcgactttgttggccgcaatttgctgttgatcagctggaatttgcgtttcagctgctgccgtttgcgacttagcagcgtcgactttattctcagcctcagcgaggacctgattgttagcatccagtttttgttgtgcacggtcaactcgggctttacccgcatcatactgggactgtccaatcgcaactaattgactttgattagtcacttgcccctgcgcagtcgccactttagcttgtgttgtattgacttggttttgagccgtgactacgttccccttggcagtctgcacgttggcttgatactgttgctgactagtcggtttgaccgttgctaacttttcgttagttgccgtctgagtgctcccctgcgtggcactcgtctgattcgtcgtatcgctgttatcagttgccgtgtcggcctgcgcattgttaacacccaattgggtccccacgaataatgccgcagtggtaatactggtatacaataatttcttattcataaactcactccaataagctaatataaatatcattataaaccaatgatgccataatgctagatggtgtttacacccttatgtcctgattgaacattggaaagccttatttaatcaggactattatgaattttagtcgttgaagaagtcgcaaatcaggaagtaccattgttccaattttacagtataaagttattttgataatcaacaattgctaatcaaacattacctagttatcattaatagccactgttttcaaaaacaaacgaaactagggtggtatatttctatccgattaacgacagtcgctggtatacttttattcacttgtttctctattgtaaggcccttaaactcctagttgtacctaattcaaaaggagtgagtcctattttcaatcaaatcactatccataaccaacatactgaaaattggcttattattggccttttctgtggggcttttgtgactggtgctgacgcatttattatttcagcactactccccgctatcgctactagtctgcatgtgccgactaacaccgcggcatacggagtcaccgtttacgcactatgttatgccatcggtgcacctttattcggcccattaggtgaccgctttaataaacgttttttgctaatcagtggctgtggcatcttcttactaggaacactactctgtggattagcaaactcattgctaacattctatctttaccgtgccatcgctggcatcggtgcagctttatttgtcccaaacatttgggcttttatcggtacttacttcaatggtcaacgacttaaccaagtcatgggcatcgttatgtcgtcactttcattatcaattgctaccggtgtaccactcggtgctttactagcacaactcagtagttggcatatggccttctggggttcagccatgctaaccttgattgcatcatcgattttgaccattgccataccttcattaccgagtcagaatgcccagcctgacggttattttacaagttttaagacattagtccacactcctcacgccatcgctgccctactgattacattaacttggatgactgggttctatggcgtttataccttcttaggtgtttttgcaactgcgacctttcatttcaacacaatacaaactggtctcatctttatcacttatggaagtgctaattttgttgcgagtttctttgccggtaaacttatatcattgcttggtaaaaaacagagcgttacaattaatggcttagtttcagctacattagtcttatccttaggcatctggggacaacatttagcagtattgctgattattctgattgtgctcgccttatctcaaggctggggtgtcactgcattaactgcaacaatcgttaatattgtgccatctaatcgttcaaccatcatgtcatttaatagtgcttttttatactatggcttaacgttaggatctgccgctggtggcctgcttttaactaaaattggcttttacgcagtgacgattgcagcggccatggccttattaggcgcagtattgattacaaatgcacttagccactattcggattagctttgagacaatcagcttttaatgcgtattaaaaacccgttagtaagttttgcaattttactactatttagtcagccactaggggcccaagccgcaactaattatcatgcgaaggattacacaactgccgcatcggtcatcaatggtcctgattttaagcacgctgataccattcaaattcagtatcaaatgagttttggggatacggctttcaaagctggggacacagtcactattgatatgccagctaatttggaaccacggaccgttggggctacttttgatgtgactgatgctgtgactggtacgggtgtcgtcggcggggatggtcaggtcgtactgaccatgaattcggcgattgaaggtaaaactaatgtaaagattgatgttaacctgggaatgaagtaccgttatgatgacttaggggaacaagacgttgtgtttgatacccaagacggtcaagatacatcagtgatcaatatggttgctaatgaagctaatatgtctaaaaaaggcaccattgataaagaaaatggcacgattaagtggaccttacttgttgatcggcgtgaaattaccataaaaaacttatcgattgccgataccattggtgatcatcagcaaatgatcaaaggtattgaagtctacaatggtgaatggtcgagtgccaacacttacaagcggcgtgataagcttagtgacgatgcttatcaagttaactacagcgataatggttttgacttgaaattcaacgatacagtcagcaacctagttgtcatcgattactatactaaaattacggatacagaattaattgatcaaaattatcattttaaaaataaagctgtaatggaatggggcggcggcacgtccggtggcaagaacagcgaagaagctaacggtaaggtctacgaaaaagtcgttaacggtgggagcggtactggcgacttaagttccagctcgagttcgaacagctctagctcaaataattcgagtgacgtcgattccagttccgacgattctaattctgaaagttcaagcgctgtggactccagttccgacgattctagttctgaaagttcaagcgctgtggactccagttccgaccattctagttcggaaagttcgagcgctgtggactccagttccgacgattctagttctgaaagttcaagcgctgtggactccagttccgaccattctagctcagaaagttcaagcgctgtggactccagttccgaccattctagttcggaaagttcgagcgttgtggactccagttccgaccactctagttcggaaagttcaagcgctgtggactctagttatgaccactccggttctgaaagctcgagtgatgtaaatactagttctgagagttctgacaatacgactacggaaccagacaatggccatcagactggtgacattgaagatcctgaagataatacggcggtttatccagatatcgatgaagatactgggaccatcgatgttgatggtgggttcgatagtaactacgatgggagtacgacttccaacagtactaattcgtcaaaaccattgaaagattcaacttcgagtgtctttacgagtacgcccgctaacacaacgacgggccaagatggtgctgatcaaacgccagcagcggatactaaaaagtctagtgctaagacaacggtatctgaaagtgacgcgttgaccccatcaacgcctaaccaagttgctaaattgccacaaactaacgaagctaagatggacagtcaagcgcttcgttcagtcggcattttgttaggtgtattaacgctaggtggcggtgcacttatccgtcattggttttaaggctaactgatagccctaaaatgatgcacatataatgttattttttaaaacggccttctgttaattcagaaagccgtttttagttagcggtcatttaatagctaacttgaaatagttagattagttagcaatggcgaccatggtcgttagaagggctcactggttaacgcacggcaacattagtttatgacgggttcacaagcggctgctgactacgttaatcgttattagtcgcaattggcataactggttgcgcaattcgatttgattttaactggataatgggggtaaagtaacgaatagatagaaatggaggtcacaagatgagtaaccgattgatttttgatgctgactggctggtgccggaacaggtccaagttgccgggcaggctattcaatattatgctgcccgtaatattcagtacgttcagcatccagtcgcagcgattcaggtcctaaacgtctttgtaccagccgcatacttgcatggcagttcagtcaatggttatcagcgggcaacggcgccaattctgatgccgaatacggtcggcggttatttgccaggaccggcggatgatccgcaacgtgtcacttggccgacgaatgcagggacgattcaacaggcacttaaacgcggttacgttgtggtggccgctggaattcgcggtcgtacgacggttgataagtctgggcaacgggtcgggcaagcgccggcttttatcgtagatatgaaggcggcaatccgttacgttaagtataatcagggccggctgccaggtgacgcgaaccggatcatcatgaatggaacgagtgctgggggtgccacttcggctttagcgggtgcgagtggcaattcggcttattttgaaccagccttaactgcgctcggggcagcaccggcgactgacgatatctttgcggtgtcagcttactgcccgattcataatctggaacacgcagacatggcctacgagtggcagtttaatggtattaatgactggcaccgttatcagcctgttgcggggacgaccaagaatgggcgaccaaaatttgaaccggttagtggtcagctcacagttgaagaacaggccctttcgttggcgttaaaagcccagttcagtacttacttgaaccagttgaaactcacggccagtgacgggacgcacttgacgcttaatgaggcgggaatgggttcatttcgtgatgttgttcgccaattattgatatcatctgctcagacggcattcgatcaagggacggatattcataagtacgcaggctttgtcgttactggaaatcaggtgacggacttggatttatcagcttatttgaagtcgttaactcgcatgaaagccgtcccggcgtttgaccaattagatttgacgagtccagagaataatttgtttggcgatgcaacggcgaaagccaagcactttacggccttggcacagacgcgaagtacggtgactgcacaactagcggacgctgagctgattcaggcgattaatccgctcagttacttaacgacaacttcgtcacaagttgctaagcactggcggattcgccacggtgcggccgaccgagatacgagttttgcaatcccgattattctagcaataatgttagaaaatcatggttatggcattgattttgcgctaccgtgggatattccccacagtggtgactatgatttaggcgatttattttcctggattgatggcttgtgccaatgatttgaatacgatgagtgaaagcgaccagcgagggcatcgtgcctggctggtcttttcgtttagttggcaacgataatgtgatgaaaatacgttgacaattttcaaaacacgtggttaaatgtagctattctcatttttatctaatcatattcttattaatttaaatggaggcctacatatggaagcaactacgaccgcggctaccgcgacacataagatgagtaccatggattacgtttataaagtttcggcaggtgtttctaatgctattttagtttgtttagggattggattgttattgcagtcactcgcgaattttgttcactgggcggcattataccaagtcggtgcgattgcgcaagtgttattgggaccggcatttggagtcgcgattgccacgatgctcaacagcaacacgttagttacgtttagcgccatgatttcgtcgacgatcggggcgaacgccgtctttttctcgcagtccgcaactaacggcgtcacagcgacggggcatacgttggcccaagcagctcagagctcgatctttaccaccggtcaaccgatttcggccgttgcggctgggttagtcgcggttctgatcggtaattatttaactggtaagacgccgcttgatatgatgttggtcccgttagcggccacttttgtcggtgcggtggttggtctcgggttagcagccgtaacgacgcccgcattggtctggctgagcaagttcatcgcgacttcgatgaaggtcaacccattgatcggttcgatggccgtttcacttgcctgggcgttatttttaatgacacctgcgtcttcggccgcattggcggtggcggtcatgttagatcccgtctcatcgggcgcggccttaattggaacaaccgcccagttcgtgggctttacgattatgtcttttcgccaaaacaacttgggggccaatatcgcgcaggggattatcacgcctaaagtccaatttccaaacttgctggtgaatccacggttagcgattccaccaatggttgctgcggttattgccgccccgctagcgacgattgcctttcatttttcaaccagttacaagctggccggcttaggattgaattcgttaattgcaccgatttcgttagcatcgacgaactttaacagttttatggtctatctcttgactggggtgctgatgccagcagttatttcaatcgtgctgtaccgcattctagttgcggcaaagtgggtcgaatcgcagcagctacagttggaaatcgtttgatgtccagccgatattaagagcctgtttctatgactgatgtgaaggccatggaaacaggttttttgtatagtgttagctgtttgttcaggatagggtgagtgctcaggactatgaaatgggacgtaaatccactatattaaaggtgtgaataatgaataagtgagatgacatcgatggaatttaagattaaacgggatgggttggcgttacaggcaaggttggagactccggcggcaccgagctcaacgctagtcatcttaatgcatgggtttacggccgatatgggatatgatacgacccaatttgtgccgcaattggcgcaggcattagttgctcacggcttggcagttctgcgttttgacttcaatggtcatggccgtagtgaaggtcggtttcaagatatgacagtgattaatgagattgcggacgctaaagcagttttagatgaagcgttgaccttacattatgaccacattgtcttggcagggcattcgcaaggcggggtggtagccagcatgttagcaggatattatccagacgtggtcgacaaactgatcttgatggcgccggccgcaacgttaaagtccgatgcgcaacaaggtgttctgcaaggtgcgacctatgatccacaacatattccggcctatttgaatattcgtgatggccttaaagttggtggcttttatttgcggaccgcgcaacagttgccgatttatgaggtagctcagcagtattccggttcggtgacattgattcacggtacggccgacacggtggtctcgccacaggcttctgaaaagtatcatgaggtctatcagcacagtcagttgcattgggttcaggacggtgaccatcgctttagcggcgatgtgcgcgctaccgcgatccaattagcactggccgcgtttaaatgatgacttacgccagttaatataatgttaggttagttaacgttggtgagtttaaaggcggtgctgacaaattagtttaatgttcaatgaaaataaccttaatcttttaccggaagacgcctatactaagagtagttagttttctgaaagtaaggtgtgcaacgtgaaaagtgaagtacagggaatcattcaagatttatatcaagaattagcaccaactgcggcgaatcaagaaattcgggcagcactattgaaggcacaccaacaattgaaacaggcgccccagcttgatcatgcgctaattaagcggttaacgaatgacgtgacttataatatttttactaaacagttgcgcttgacgccaactgaaaacttattggttagtgagttactatcggtcagtcatcggttgagtgcgtaatggctgaaccagcgactcattttggaggtgggacgatgcgccgaatcatcgcaatcgggaaagcactagtgacggccggatggttaataacgattattctggtgggttacggtgttagccgtcagctcaagcggacactattcgagtagcaccctgttatcggttacaaattaatttgctcaatctaatgaatataaaaagcctcgtaaattaacgcattatcataagcgttaatttacgaggctttatttgtgataccttcgaacaactagtattgactaccgaacaagttaccaatttgattggcaaagtcagttgcgtgactgagaagtgcagtctgtaaatcctgcagaataattttatccataaagtagaacagcaggctaacgactagaaccgcaataaggtctaggtagacgcggctaattaatggttgggtcaccgacttgttaatgacgaagatcaaacctaattgccagacaaggacactaacactcaacaggataatcgaccatctgaagctagccgcaatggtaaagaagttatcaacactgaagttaactagggacgaagcaaaccataataataggttcacaataatcgcgtaattggttaactgaccgaagcgtttcatataggtcgtaaagccgactttggtcccacgactgccaagtaagcaagtgacatagccgacagccaggtagaagcacatgccgattaggagacataagaaaatctttaagtcggtggaaaaagctaatttactaatgtggaaatagctttgactgtcattggcagtggtcagaaacttattgctaatggttacagcggccaacgtcataaatagtgcttcaatgacaaaggaaatgtaactaaaataactttcagttcggacttcacagctaggatttttccagctagccaagagccaactaaaataattcttagcagatgattgcagctgttggacttgttggttagtagccgttcgtgtcgtatcagcagctgctgaacgtgatgctgtttgtttttcagcgctggccgattgttgttgattggctgaagctgtgctggtatggacagctgcttgcgtcgttgcagtcgttgtttgggtagctgtggctgaagtggcgttggccgttgccgaggccggtgtcgctttggttagatcgtaaccacagtgggtacagaactttgcattggcagcaatctcagtgccgcagttgggacattttttcataagttaaattctccttcattaattatcagaatcatcggatttagtgtacgaccgaattttttgggccggtgtgattttaacaatcttgtagtgccccccggttttctcgaccgtcgcggtgtaacgaaagacctgaatgcgttcatcttcagagttggtaaagtcatatttgacgtcataagtgatctgactttgttgtttagctgctggaaccgttgataagacagtcggctcataggtgacatcgaggacgtcatcattgtcgtagtagcccttcgccatttggaccagttctttgtagtccgtgttatcggtaccgttgacgaagtagtcgtccaaagtgcggtcatcgtaatccgaagcatccgataggtcaccggtggacgtataactgctgacagcggtgaagataccgttcaggtagtccgaggcagtatctttactcatcacaccggcaaatttgaggtccacgtcttgaccctcagcgtcactaacgttagtttgtttggcggtcaatgtttgtgaaccggctttgtatttaccagtcaacatcatgcgattagaccagggaatatcattcagcgccagtgtgccactgctgttaatcgttccttcattttcgccattgatataaacggtggtattcggtgtaccattaacggtgaaggaaattgtacgtaaatctaagtcgtaagtttggccgtttgcccggaggtaataggtgccctcattggtaatctgatggccgctaaccgttcccttggcagtcaaggtgtatgaaccaggaacatacggcccgattttatgctcgtaagttgctttattagatgttgcgacgtgcttaccattaacgctgagtgcaacgttacggtggttcgtcgccagtgtggcataaacggaagtgacttgtagttgatacttatcgaaaaacaaccaggctttaccggttttaacgaactgaataccgtaatcattagtcgcagaacgacttttaagcgaactagccagtgatgctaatgattttcgattgtttttaaagtaagtgaccatcggcttgacgctatcatttgtaatcttgagtgatgggtcagtgctagttacttgcttcgctaaacctcttccagtcttgagtgcggttaagtcacggtcgagctgattgagcggctgataataattctgtccatacagatagccaccaatcagaatgacaacgataacggcaattagaccccaaccccaagttggcatatggcgttgggcttgttgtcgaaccttgcgcgtcgaacttgctgttgactgcgcggtgtttactgatggcgatggctgatcagtggttgcgtgcaacttaaaaccgcagttaggacaaaattcatccgttgcggccactgcttgcccacaattaggacaaaacgatgcttggccgcgacgatcgtcagcggctttaaaaaattggtgctgtttatacattccccgatgctcctccaaaaatagattgattagtcgacaataaaagactatttattggagtcttcacagtaaatagccgctactatcaatcgagttaaaattctgaataagacgtgtcacttgaatatgaataataagtgctaatcgatgaataaggctattgatgactaatcatcgttaatagcttaagaaagtctaaaaattattaacatattttaaagtataaacatgattaaactgtttatcaatatttacacggcgtatttatttagtaatgccccagtttgcacaataaacgacatgtcacgcattaaaaatacgactcggctaaatgctgtgccggttcgttagtcatgaattatgattgaaacgtgccaagtttagattgttattcgtcagccggtgcgcgtcctattccgacctccggggctgggtgacaattgctggaacgtagccgacgtcgatttgagctaacgcccaacccgcgtcatctcaaatacgagtcttattctaagccggaagtaccccacttccgactaagaataatttggctactgagcattgtccacccagcccctccggtcgggaagtcgctcgaatggctaatgaacgaccaccgaactcggtacaatttgtcgttggctattttgattaaacaaagcgttaggtgtattaagccctctgtcaagagcttaaatctcactacaccaattcaggattagtgagctatctcaatatcattttcaccctgacagttgattgacaaagttattgtttatgaaaaacaatgacgaattcaccaaaagttgggtacgcacatgtccgccattcgaacactgtcccgactggaaggcatttcggccaatgctcagcactgccaagagtgtgaggttcagacggggtgagactgaggattagcctagctagggcgttaagcggtgaatttccgcttgacgtcatagcgtagctaaccggaagtctcagtctgacccgagcacgtttcaccaatatggcattaaagcgtggaagaccagtatttaagacgtgggttgcggcttaaatctgtgtccaccgcgttccagcaattggcagaaatgcctggaagtcggcgtaagacgcgccaactaagcaattttacgctaactcgaactttttccagcgggcctaagctggctgcttttgactttggaaatcagcacgtttcaatcataattaatacataacaatcatcgacctaatgcgtttagttgtattattccattcacgaataacatatctgcgcaatccgaattgaacccgcttacgagtggccgtatgatggtcttgtaaactttaagggagatgaatgaaatggcagaacaaccatgggatttgcgtcgcgtgcttgatgagatcaaggatgatccaaagaactatcatgaaactgacgtcgaagttgatccaaatgcggaactttctggtgtttatcggtatatcggtgctggtgggaccgttcaacggccaacgcaagagggtccagcaatgatgtttaacaacgttaaggggtttcctgatacgcgggtcttgactggattgatggcgagtcgccggcgcgttggtaagatgttccatcacgattatcagacgttaggacaatacttgaacgaagcagtctctaatccagtggcgccggaaacggttgctgaagcggatgcgccagctcacgatgtcgtttataaagcgacggatgaaggctttgatattcgtaagttagtggcagcaccaacgaatacgccccaagatgctggaccatatattacggtcggtgtggtgtttggctcaagcatggacaagtctaagagtgatgtgacgattcaccgaatggtccttgaagataaggataagttagggatttatatcatgcctggcggtcggcacattggtgcgtttgcggaagagtatgagaaagctaacaagccaatgccaattacaattaatattggtttggatccagccattacgattggtgcaactttcgaaccaccgaccacgccattcggttataacgaattaggtgttgctggtgcgattcggaaccaagctgttcaattagttgacggggtgaccgtcgatgaaaaggcgattgcgcgttctgaatatacgcttgaggggtacattatgcctaacgaacgtattcaggaagatatcaatacgcatacgggcaaggcgatgcctgaattcccgggttatgatggtgacgccaacccagctttacaagtgattaaggtgacggcggtgactcatcggaagaatgccatcatgcaaagcgtgattggaccatccgaagaacatgtcagcatggcgggaattccaactgaagctagtatcttacaattggttaaccgtgccattcctggtaaagtgacgaatgtttataatccgccggctggtggtggtaagttgatgaccatcatgcagattcacaaggataatgaagcggatgaaggaattcaacggcaagctgccttgcttgcgttctcagcctttaaggaattgaagactgttatcctggttgatgaagatgttgatatttttgatatgaatgatgtgatttggacgatgaatacccgtttccaagccgatcaggacttgatggtcttatcaggcatgcggaatcatccgttggacccatcggaacgcccacaatatgatccaaagtcgattcgtttccgtgggatgagttctaaactagtgattgatggcaccgtaccattcgatatgaaggaccaatttgaacgggcccaattcatgaaagtggctgactgggagaagtatttgaagtaacgtcatccattgcacttgatgagcgtatttttatcgcattgaaccaaaatttaatcttacaaagagccgccagaccaacggaagtgtgctggtcggggggctttttgctgtcaaaattgaagggagcatgtagctcgtgaacaagaaaacgattggctttttcagtggaatcgccgtatttgccattatttacttcttaccgattgccggcttgtcagctaaggggcagatggacttggcacttagtttgatgacggtcgtctggtgggccacccaaatcgcgcaacccgcgttcgttggtgggatttacttaatgttgctcattattatgaacgtggcgacaccgtcacaggtcttctcttcggcgtggactggttcaattatgtggctcgtaattggggcgtacttgattgcgggagcggttaatgaatctggtttgggtcaacgcatcgcgtacgcattcattatcaagtttgtgcggagttggaaagggattgtgatttcgatttttgccctaacctttatcctcgcactcctgattccccatccatggcctcgggcgttcatgattatgtccgtcattacggtggtcgcggaaacggcgaagatgcccaaacgcgatttggctaagctaggcctcgctgtctttgctgcgtcctgtccactatccggggtcttttatactggtgacacgtcactaaatccgttggcagtacaggcctctggtcaaagcgtcaactttgtctcttactttatctacatgggcgtgcccatgatcattgcggccatcttaaccatgtttctgttcttattcctcttcaagcctagtcaggaagtccacatcgatgtggaagcgttaaagcaacaacaagcccagttgggtggtatgacggggaaggaagttcgaacaattatttggctgatcattgcgattgcactctggttaacgagtgggatcaccggtttggacgttggttggttgacgttgatcgttgcgctgatgatgagtctcccggtagttggcgggatcttgacggccaaatcatgggaaggtgttcccgtgaacgtgctcgtgttcttgacttcggcaatcgcaatcgggaatgtcggtggtgtgactggcatgaataattggattgcgaagaccttgattccaagcaacttgccaactaatatttatttattagcgattgtgattactgtttttgccatgattatccatatgttcatgggttctgtcattgcggtgatggggattacgattccggccttcgtagcggccacggctcatatgggaatttcacccttggccgtatcgttactagtcttctcggtgacaaacttgcattatattttaccgttccacaacctcgctgtcttagttggaagcgaccccgatactggtgggggttacacacaaaaagacgtgatgcggttaggaatcccactgacggcggttgtctttgtcgttgcgttagttgagatgttctggttccacctcgttgggttggcataagcggataagtttaaaaaatacccttttcaaacggccggttggtcggatggaaagggtattttttaaacttgttgattttcctgggcagtcaccgtcaagtagtcaattaagtcggtgagtaactggttccccgttcgctggggatatacaaagttcagttgactgatgaacgggatggcgagtgagcgcatgaccacgtgttcagtcatgaacggaagtaccgattgtttaaataagaaagtcacgttattttgattgagaatgcccaggagcgtttcaatatgcgtactttcaaagaagaattggggcgtcatgccttgctgagcaaagagtgcgatgatcggttcgtaaacaccggagcccggtggtaacgttgcaattttctgccgcgctaagtcttgaatccgaatgactggctgggcagctagggggtgatcacgcggtaaaataattttgagttcgtcagcgagtagtggttgtttttgaaattcggtgggttgcaattgggtcgtctgagtatcgcgaatgatggccgcttgcagctcaccactcagtaaccgtttgacgatttggtcgccctcatcctcgatgattttgatttcagtatcaggatgctgagtatcaaaagtggcgatctttttggcaatgttatattgacctgagattggaatggcgccaatgatgagcttggcaaatgtcgttggccgattcggtgccaaatcgtgcatcatggtctcatagtctgtaatcattttatgcgcatgatgatagaacgtttcaccagctggcgtgatttgtagacggcgcttgttgtgtgtatctagtagtttaatgttcagttcgttctcaagggctcgcattcgtttggacaattccgattgtgataagtggagttctacggcagcgttagaaatgtggcgtaaatcgtacaccatcacgaatgcttggaggtcattaatggtcatagcagtcacacttttctttaggttaaattctattctaacaccgatggcgaggcccgcctaattaagtaacggtataaattagtatcaatattgtgaggccgctatggtaatcgaaatattagttattttttttattgagaatgggtcactaataaaatcatggtgcgggttaacatttgttagcggtgatgattattcgttaccgtttaattgtggatggggactcgtgttgagggaggcagtaatgacatctagatataattattttggtgatgtggatgaaagttgttgagtggttggtgattacaaatacgctgaatcactagctttccttgcttttgaaattgaatccggcaaaatgaaatagttccagcagtttcatattgatcatcatgctggtcatggctgggcaatactttttaaaaggggattagtttagtatgtcaaaagcgcttaagatagtgatgggaatcaccatgttaacagggggcatcatggcccagaaaatgacggtacatgcagccgaatctaacactcgaaccggtcaggcagtaaggatgaatggcacggtcagtttagcaagtcaggtcgaaaataacccagctgttaaggcggcccactaccaggtaacgcaagcggtgcaagcattaaccatggctactacggcagtcaaaacggctatgagtgatctgcaagcggcgcaaaccacgttagacgctgccaacaaaacgttagccaagaatcaaaagattcagacgcatatgggcgtacttaagcaagcagccactgaccggcacgtcaaggcaacgaaagcacttgatgaacaattggcaactaaaaagacaagccaaactgcggtaacgacggcgcaagcggcagtgactaagtcacaagctgctgttcaagtagcccagagcaacttcgataaggataacagtgcggccaacaaagtcacgttacaaactactcaggcaaagctgaaaacggtgcaagagacgttaacagcggcacaagctaaccttgataagactaatgagcacgtgatgatggccgaagaagaattagccaacgccaaaattgaagtcagtggcacgagccgcgacttccaaatggcacaaagagattatgatattgttcagccccaagcagcagttaatcaggcgaaagcagcggtgacagctaagttgcagcgcgttgcgggtactcaagatcaggtcgttactgcacagcgggaattgtcccaagctcaagctggattaacgaccgtgcgcgcccggaccttggcaaccttaacagcagcggccgaaaagccaatgactgaaaaacctgtgggcgaacgaccagtcgttagtcattcaactggcacgtcaaccagcactaatcagtcggcggcaccacaagcgaccccggccaagcccactcttaatcagtcaagttcagcttccgtcccaacagcgcagcgggttgttacgacgcagccacgacaagccacaacggtattgcggacgacgacgagtccggcaatggctaagccagtgactcagcagacggtgccaacgaccgcaactaaaacggccacgttaccacagactggtgaacaaaccaatcgagttttgaccgtattgggcttcgtattattggccgcaactagcttatttggttttagcaagcaacaacggcgccataaaacaactgattaattaacaagtgtgtgggcacaattcgatttctcaatgattatttcgaagtgcaagactagttcaatcggttactttagtctgagcgactaagttgacggcggaattaatggcgatttaaaaaagttctttcggagttttagttgttcctgaaagaacttttttgctgggaatgattggtatcgtttagttaataataatatgctaagaacgccagtttttcggccggaaatacttgcttgaaagtagctgctggactactataaacatggtttcaaagagcccaagaattttactaaataaggagttgagtttgtgatgatgacgggaatgatggttctatttgtattgttagttggtttagttttaagtgggattttcttccgatatatggatacaactgccggtatctcattcagctcactgaagttcgctgatttgcggatggaattgttaaacttggtactcgttattggactattgctgtgggcactggttttaattcgttaaagcgacaattaaacttatcaacttagctattattgcgagtccggttaacgccggacttttattttggcttgtgattggcgaattatgttagtgcggccgccaaaatacttgcgcttcaacgtggaacaccgctattatggataagtgattattatctagaagggaatgaataactatgacgcagtcgccatattggcaacggatcgcggccaaagctcaggccgcccagcgaccgttttttagtttagcaccgatggaagccgtgaccggctccgtttttcgccgggtcgtgatgcgcgctgcggcccccgatgtcttttatactgaatttacgaatgcgttaagcattactcacccgaaggctaagtttacaacgcggggacgactatatgttgatgaggccgagtcgccccgaccaatcgttcaactttggggcaatagtggtgaggactttacgaaagcggcccatgaagtgaagaatcaaggttatcaagccattgatcttaatatgggctgcccagatatggcggtcattaaaaatcatagtggtagtgatttaatccgacattttgatcgtgccaaagaagtgattgagggcgcacgtcaagcagagcttcccgttagtgttaagacgcggttgggctttgacgatgtgcatgagtacgagacttggattccatttttgttgcaacagcaggttcccgtgttaacggttcacgtgcgcacgaagatggagatgagcaaggtaccagcgcattatgagttaattgataatttagttcaaatgcgtgatactttggcaccagcgacgctattacaaattaacggggatatcctggattatcaggctggtctgaagcttgccaaagcccatccaggagtcgatggtatcatgattggccgcggtatttttcagaacccatacgcttttgaaccgattccccagcctcattcaacgcgtgacatgctagaattgttacggtatcaagtagatctgtatgatcaatttattggcttaggtctacaagggcatttcgcaccgcttcaacgcttctttaagatttatgttcgcggtatgcgtcatgcggccgaattgcgcaatgaattaatgcagacgaagacaacggatgatgtccgtgcgattattgatcgcttagaggctaagctaccagcggattaggtcgcgttattttaactaaaacggctatatttttgccatttagctgtgcttgattaaaatggttttaatgtcgaacgtaccgcatctaaagtcaactgcaaattaaatgctagcctgtaagtggaccataaaataagctaggtccttcaagaagttaatttcttggaggacctagcttattttgtggtctaaattattgtaaaccggtcatcgagtaaggtaacttgttcaggtgataagccaacgatttgaagctcacgttgtttagtcacaaaaatggcgccgtaaatatcgagtcgctgagttgcccaatcgggaatcggttggcccgcaaagaagagccgcgtcgtttcgatttcaccatcaatggaagctttcgagaaaacggtgacactttcaaggtcgttttgtcggggataacccgtttgcgaatctaagatgtggtggtaggactggccgttaaattcgaggtgccgctcgtaaataccgctggtcacggccgagcaggggccaatcgtaacgctggcaatcgcgttaccgcggtcagtggtgggatcttggataccaacgcgccattgcccatccggatgaagtggggacgtccccaccattaacagattaccacctaggttgatcattccggcccgctgtccaaatgcttcccagtaatcttgaatgcggtcggcaatgtagcccttggcaattgcgcctagatccagctccattcccgtgaccttgagaagcacactgaaatcagcgtcattacaaatgacggcttcggggtcgatcaaggccaatcgttcgttaattgcagactgttcagggacgtgcgcgttagtaaaaccaatgtgccagagtttcacgagcggaccaatcaacgcattgaaaccaaaatgttgtcgactgagttcgacagcttgccgaacgagtgtataggtggcggcgctcacttgaacgggatgttggcccgccgcctggttgattgccatgacctcagaaacagtccggttgacagtcaagcggtcttcatattggtcgataagatcgcaagcaacttgtaggtactggtcactatcactaccaaaaagggtcaaatcaatgtcggtaccgagcgcgtgatgagcttggtgtcgacgctgctgagcgagtgcaggaattgctgtctcgccattataagctaaagttgtcataaaaccagtcctatctttcataaatatcaacgagttcagcaaactgaacatttattcccgctcagttagaagtaggcacaattaaatcagtttccctgcacagtgatctaattcgtgttgaataatttgtgctgtgaagtcgttgaatcgttgttgttgcggtttaaagtgttgatctttatatttcaccgtgatttggtgatagcggctagtcggacgttcaccaggtaaggacaggcagccttccttagtctcgtaagtgccgtgatgatcaattatcttcgaattgatcattgcaattgcaaagggaccgagttgcacgacaataatttgtttgttgaccccaatcatattcgcggccattccaacgcaattatcggtgtgtgcggcgagggtatccagtaaatcagtcaagacttgagtgtctgcaggggttgctaagtcagcagggacactaagcgcggcgggatcatgcacaattggtcgaatcatttgatgttcctccattgattagtcatattaattaattatagagagcacggttgacagaagcaagccgttcgctagttgtcaggccctaaaaaacacaccacactcacacaagtcaacgtgcaaatgtggtgtggccttcaattagtacgacaatttaaatgttggcgttaaggtgcccgcctttaaggcgtcattagttgtggtgggaacctggttgtgttcaggctgccaatttggatctttaatcagtgcgatattagtcccttgataattcatggtcatttgattagcgtcgttgagggtcagttttgcaacattgtgatcgattgtgaacgtggcacgtgtatcacttaacgttaacgttgcgcgactacgaatgggcgtatgtccgcgtcggaaccaagcaacttgatgattggtactgaggtacagactcattgctggtctagcgctgacccagcgacctaagaaatcccgagtcgtgactgagcgaacggcgctgacttttgatgttgctggttgaacggtgggcgtttgtgtgtcagtggcagaatggcatcctgtcagtagccctgtcaacaacaagccaacgattattcccctgcttttttgcataattattctctcctccaatgtccacatccctcaatgaggacttaaattcattatagcgaatccgccgcatgagttaaacaaaatagtcataagttaatcagtttacaacaacttggttgtgttcagcttaatttttaacgaattaaaattcggtttatggcgtgtgaaaaatattgaaagcaagccgtatcaaggttggttcggtagttaacgagattgattaaatattctgatattagataaaaaacagtataaaaaatattttttaaatattccaaagacgcactaaccggacgattaaagcgatttggtgtacacaactgaaggtgacagttaattttggcaatgggcaagttaatggaaatgagctactatatatagtattgattcaaacagaacgcactatcaattgtattcgatcaatgactttgaaaagtggggaattaagatgctaacaacgacaactaacgatatattagaccaattacggccactgaccgtcacaaagcggggtggcgcacaaacgaaatttcatccgtataaaattgactttgtcttacgacggttgttagcgactgatgacgaggtacgggtcgtcaagcaggcccttgttgcccagtatcaagatgctgacaacattgatactcgggagctacgtagtaccatgatgcagattttgaatgcgcaaggcctgaccgcggcagctaaggcatatcaggattactttgaagctgaacagcagcggtttgcggcagcaactaatgttcaaggacggattgaaaagttgtttgagcgcgatgccagcgttgtgcatgaaaatgcaaataaggatagtacgatttttaacacgcaacgcgacttagaagccggtgctgcaagtcgcgccatgggcttgaagatgctaccagatgtcgtggctaaggcgcatctgcgtggcgatatccattggcatgatctcgattattcaccagtcacgcctgaaacgaactgttgcttgattgattttgacggcatgttcaaaaatgggtataagattgggaacgccgaagttgcctcaccccggtcgattcaaacggccacagcgcaaatggcgcagatcattgccaacgtggcttcattacagtatggtggctgttccgctaaccgggtcgaccaattattggctccctatgcggcaatcaactatcaaaaacatatgactgatgcgaaaaagtgggtccctgccgatcagcgggaagcttatgcgaaagccaaaactgaaaaagatatctatgacgcgatgcaagcccttgagtatgaaatcaatacgttatattcgtcacagggccagacgccgtttaccacggtcaattttggtctaggaactagttggattgaacgagaaattcaaaaggcgattctccagattcgaatcaagggactcggtaaggagcaccgaactgcgatttttcctaaattgatcttcacgatgaagcgggggttaaatttaagtccgaatgatcccaattatgatattaaaatgctcgcgattgagtgttcaaccaagcggatgtatcccgaccttttaatgtatgacaagatcaaggaattaacggggagttttaagacgccgatggggtgccggtccttcttacaaggttggcgtgatgaaaatggtgtcgaggtaaactcgggccggatgaatttgggcgtggtgacagtcaacctgccacgaatcgcgttagccgcacatggggaccaacagttgttctgggaaatcttcgaggaacggatggcgacttgtcatgaagcactcgcgtaccgtatcgaacgaacgaaggaagctaagccggaaaatgcaccactcttatacatgtatggggcgtttggtaagcggctaccagcaggtggtaatgtcgatgagctcttcaaaaatcagcgggcgactatttcactgggatacattggaatttatgaagtctgcacgaccttctttggtccgaactgggaacaagacgagcacgcgttagcttttgcggagaccgtggtgaaagcgttacgggataagtgtgcgcagtgggcggctgaaagtggctatcattatagtctgtattcaacgccggctgaatcgttgacggatacgttctgtcgtgacgatattgcgaagtttggccggatcgcagatattacggataaggaatattacacgaatagttttcattatgatgtccgtaagcacccgacgcccttcgataaattaactttggaggaacgttttccacaatatgcgtcaggcggctttattcattattgtgaatatcctaatttgactcagaatcctaaagccttggaggccgtctgggactgggcctatgatcatgtcggctatttgggaacgaatacgtcgatcgaccagtgttttaagtgtgggtttaagggtgagttcaaggccactgcccgtgggttcgtctgtccagaatgtggcaatcacgaccctaaatactgtgatgttgttaagcggacgtgtgggtatctaggtaacccacaacaacgaccaatggtacatggtcgccacgttgaaatcgcgtcccgtgctaaaaatatgtctccggagatgattaagaatgccgcgcgctacgaaaggaccaaacaatccgatgcccaaagaatggctggcagaggacttaagtgaacaatatgttgctgattataaggcatttaactttgttgatggggaaggggtccgctgtagcttgtacttgagcggctgcccattccactgtccaggctgttataatgtggcggcacaaaattttcattatggacaaccgtattcacaagaattggaagatcagattattgaagaccttgggcaagattatgtgcaagggttgacgttgctaggtggtgaaccgtttctaaatactcaagtcggcattcggatttgtgaacgcattcgctccgaatttggaaacacgaaggatatttggtcgtggtcaggttatacttgggaagaattgcaacaagactctgaggataaactgaagatgctatcattaattgatatcttggtagatgggcgctttttacaagataagatggatctctcgctacaatttcgggggagttccaatcaacgtattatcgacgttcctaagtcgctaacagctggtaaagtcgtcatctgggataagttggttaagtgaaattaagactggtaaaaagagcgttatgacgaggtcgtcacgacgttcttttttgttacggtcaatataacggttacatataacccttaataatttttttaattaaagtctgtaactatgtctcgatattttagttaaaagcggttatactttacaggagttgtcaatttatattgacataaagaaatcattaaaagcgaggcttcatgaatgtatcgtttttttgttcaaccccaagttgatcacagccatcgagctgtttttggttatgaattactgttacgtaaagagatgaatggtcactgggccgttccgaagtcgttcactgaattatcattagataaacaagctgaattattagaacaacttgctagtcaattgcagacgaaagcgactaatcaggtgttagcccttaattcaaaccggcaacaagctgaggacgacctgatgttagggacgatcatttacctaaaaaaaaggttgaatccggccgcgctgacgattgagttgacagaatgtccttcattaaacgagattcaaaaatatagtctctttttccaccaacatgatattaaattaagcattgatgacgtggggacgggctcgagcacgtttgagaatattcgccacgcactaccgtttgttgatcaaatcaagtttgcgatgcaaaacttacggatgagtgggcaagcggagcgcattcctcatgaattagcattttggcgtgatattgctcagtcttaccatctggaatttattctggaaggtgtcgaagaccagggtgatcaaaagatggccgaacaacaaggtattgaatggcaccagggttactattatgggaaaccgcggttagtcgatgatggtcggcaattggtcaacggcggatgctgagaaaggatccttacgatgacatggtctaattggcgaatttcgccgttcgtaacgagtattttctttatattaggtgttctaacactttactgggtcctctttaattggattacgacgtggtttcatgcccgtcacattaacattgacgatgataccgtcaatgcttggcacggtgtgatttacatgttggtctttgtgtttgtcatgcaactgtcggtcgtcggtaaagcagatagttgggagtttgttaactttcacttgattgccgtcgtgttctgctcgttttttttgaatattcgaatgccgtattattcattgttacctgtggtcatagtgtacatggttttcgaccagtcgattttttactgggaatcgtggagttacgccgtcgtgttcgtgctatttttctggagcatgaattatctacggctgtgggtacctaagcatcggtatccttggctatattactatggcgcggtcgctttttacggcggaatcttgtggggcctgatcaagcttaaatattcgctggattgggacaatactttacaagaatatggctacttaatgatttttgcaggattattgtacgcctacgttaatatgctgacccaagatagtgagattaaattacggttggcccagtttgcgagtcacgacgctttgactgagactgagaactttgccgcttacacggaacatatcaaatatttattcgatgatagtgccaagaacaatctcaacttatcgatgatgatgttcgatattgatcactttaagcacgttaatgacacgtacggtcaaccttgcaggggaccgcgttttgcaagaagttgccgccacggtcacgacggtcttggccgccaatgacgagaaggtcaagctgtatcgcaccggtggtgaagaattcaatgtcctgtttcccggttatgatctggctagtacaaaagtgattgtccgtcaggtctttgaagcagtcaatcatctcgttgttaagtatgaagacgaggaaatcaatgtgtcgatttcggttggtgtctcgacactgcatcaagccgatggtagtccgattgatttgtacaaccgtgttgatcagaacctctatttttcaaagcggcacgggcggatgcgtgttacggttgaatagtggctgagattaaaaataaataacgttgacttgttgagctcccggaataaaagccggaagctcttttttgctcgcaatcggtctgactgaaattgtaggcctaaccgtcattgcctgattgacgtattggggaaacatgatgtcaaatctacaagattgattgagtgcgacattggggttatggtggccaatttcagctatttagtagcatcgttcgttaattgagtttacgaattaacgctaacagatgtaaaccttaatcgaaaccgttaattatgctggcattctagtttaattatggtatggtttatgttgtaaagataacagtcaatgacttaaactaattgacttacatattaaagaaaacaagttttttacgttacgtttgttaaggttatttaaatacgaatggttgccaatttataaagtaaggaagtgagaagtgtgccagtggtcattagctcattaattcccgtagttgcgccggttaaacgccaagtgatcaatgtgacgacccttgcaaatacggttcacttatatgggttactaggatttaagcagcaaattataccggcaacggatcaaattgttgcgccctttgctggggttatcacagccgtggcagccaatcaacggttaattggctttcgagcggccaacggtctggtgggctggctacggattggtcaattaaccagtgctttggaattgcctacatttaagttcaacgttaaaccgggtgactgggtggttgctgggcagatgttggttgaagtgatttcactactgacacaacggctccaaccagttaaaacgacggtggtattgacgattagacatgcggttgttcgtgttcgagaacggttgctggcagcaagtaatcaagtcgatccgatgggaactgttatctcaggtattacgaccagtatggctggtaatcatcgggtcgcaacgatcgggccaccccaaggtaattaattgtttgacaataagcaatcgacgtcctagatacggggtgtgtctagacgtcacgcttcgacgcagcccattgaatgggcagtagtggctgaggtgtgcgttttaataacgcagttaggggcagtgctggacgcatgaacagtactggttcacaaggtcgccgtactaggaggtacggcgtcgctgatgttataaggtattaagattaagtagttgtgggtagcagtaattggtcagcgattaagttttggcagacttataagcacaactgctatcacgggtacgattaattgggtgctaacgtaagtatggttacctagttaattaagtttcgtcggtcaaaggttaggccggtattaccgagatggttgtgggggtataactacttcggcgatcgtttgatgtcgtgttatgttcaagataggtcaattatttggtttaagaacggatcacttgcttttacttggcagtccagtttatcatgacggtaaattgtgaaggagtgattcggcatgaattcagcgacatttaatcaaactgaattagcaaaatataatggtcaggatggtcaacccgcatacgtggcggttgatggtgtcgtttatgatgtaacgggggttgcagcatgggctggcggtaagcatcatggtaatcttgcggggcaagaattaactgcagtcatcgacaccaaatcaccacatggacgtaaagtgttaacgggactgaccgtcgttggtcaatacgtgactaattaaattattgaagactggttgattgtgaccagtctttttttgtgtggataggcggctgttgtgattgcttaaacgagctttcacaccaaaatttttcgtactgcgaggcaagtattgaccaattttaggcggctgtttgtgggtttgagacattgtgtaaaataagtgcgtgatgataatcgatattccaagtaaacgaatagataacaaaaatactaacttatgattagttaagacctgtaatggttgctggcacgtctattgacagtcatccactgtttatataacaatacaaaataaattatataaagagttgaatgttgtatgaaaaagcgtgaaaatagaattgaattaaaggaaagttaataaactatattttaggtgggtaagtgatggagcgaaaacggacgaattttaaaatgtacaaaattggccgtcgctgggcgtttgcatgtgccgttatcttgacgatgggcacaacaacgctggtggctcgggctgatgatggaacgactgcaacggggactgatacggcatcaaccagttcaagcacaaccaaatcagtcacggctaagacacaaactttgaagactgcggccacaactgaagcggatgtgactaaccaaaatcagccggttttagataccgatggttcgaattcaaagactgctgctggcacagtggctggaactaaggcggcaacggatactgatacaaacgctaccaccaatttggatgagacaactagtgccaatactgaaactggttcagatacgacagctggttcaaagacggcaaaagagacgaatgcgacaaccggttcagagtcgacaaaagagacgtcgaccacaactgattctgccactgcaacggctgcgcggacaacaaccagttctaataaaggtgcgactactgactcagctaccagcaatgataccgcggcaacggctgctaaaactaccgatgctagtgctaagattgccggtacgacgactagtgatagtgtagcccagcaaacgacgacaactaaagaccagtcgacgacaactgcaacgccccagaccgtcgcggtggcgcttagtcaagctgtgacccatgcaaacgatgccgttgccgatggtggtaatgtgacggacgattatccggatctacataacatgctcggggtttcgtcccaattccatatttttgcacgggaagcggaactacatgcccatacgaatgggaacgttgcggtgcaaaacttagtgggcaacgttaactttggtacgaacattattgaagaattattagataaagatatttcgtatattcaaaatatcagtaatattgctgggagttcgtttgtttcggctggtgagacgcggagcaataaagttatctttggcgaaaatattgagattgatgtttcgaatcctaatcggccgatggtcaacggggtctatatcgaccatctacttgcctctgaagtttatcaagacaaagatggtaacgtctatattgattttgacaaagagtttgctaagttggaaaaattgagcgctagtcttagcgaagcgtccgcgaacgccacctatacgagtgacagttttgaagatatgaatcagcgggtcatcgatgtgacggatatgcaacctgatgcggatggacacattgtgatcaatctgtcagcggatgttttaaacacgagtacgccgctgacaatcaagggactatcggcagatgcggatggtaatacggtcattattaatgttgatacggcaggtgcgaccaactatcaagttaactcgcagatcaaaatcatttatgatgacggtacggagcggaataataaagaaactgaagactttggtgataaccatttgctttggaacttctatgattcaaccgcgagtgacaagttagcaactggtgtcattagtgtcgaccggccatttcaaggcagtattttagccccagcggcggaaattgatgcaaatcaaaatattgatggcaacatcattgctaataaagtcaacgtgaaggcggagacccatcgttgggatttacaggataatgttgataatgaaaatgatccagaaccagttccggactatgagaaaccggtacatccaagtattgatgccgaattaccagatggtggcgagggcgaagagccagaatacgacaaaccggtacatccaagtatcgacattgaaatgccagatgacggcgagggggaagaaccagaatacgacaaaccggtacatccaagtatcgatatcgagatgccagacgatggcgaagaagaagaaccagaatacgacaaaccggtacatccaagtattgatatcgaaatgccagataatggcgaagaagaagaagagtacgacaaaccagttcatccaagcatcgatgttgaaatgcctgactttgacgagattgaggacgaagaagaagctgaagacgcagaagaagaatttgaagacgatattgaggatgaaatcgaagctggtgtgacgccagacgaagttgtcgaccaaatcgaagaagaagtcgacaatgaaattacagctgactgggtcacggacgaaactgcgactgaattggaaacggcgtttgaggaagttcaaaaagaagcagtggttggcgatcagattaaggatgaggaaacactgatcaacttgattgaccgggcaatcgcacaagctaaagcgcatcataatacggcgttagtagcgcaattacaagctctacgaactaaggtggctagcgcgttggcagtggctaaggggcaagcattaccacagactgatgaagcgccaagtcagatgattagtttagcgggaatcgcattagcaagtacattagtattaggtgctgcagcggttagccggcggaagcgtcagtattaagcttaaaattgtattttgaagcaactgttgattcggcaagtttaatcttgcgaatcaacagtttttttgcataaaaaagtcactaaaccaaattggtctagtgacgctcaattctctctactccatgaccgacctaatctcttgaccccaaatgcgccactagtgaaacgtggtataaatgctaacccccattagcatttatgatatttattataaataattcagcacattagtcaacttttattcgaatatatttttaatttatgttgaaacctattcacagataaatttaattgaccgactgaattggtctaaagtaagtaaccataataaaaagctggatggtccggatgaccattcagctaagtaatgttggtaaggtttaattacgaattaattcattgaagttaaattcgttcggaataaagtgggattcagtgtattcaacctggcgtccttcatcgttaaatgcgatgctaatcatattaccgacgcaattattatcaccgagcgctagctgagctttgtcgagttcgttggcggattcgactcgtagcattcttttaacgacagcaattttcagaccattttttttgaagtgttgataaattgagtgttgggcaatggtcttagtcagagtgggagtgcgctgggcgttaaaatagttaatgtccagcactgcccgaataccgtctacgatccgaacccgttgaatagcatacactggaatacccacttcaaaagcggtatgtgtgctaagcggctggtcaacgattcgttgctgaaaggccacgacctcggtctgataatcgaggtggcgctccgcgttgaggctctgcagaccgttgagattatttaaagccagattgaattgctgggtttgtggcgtgtgctccaataagaccaccccgcgccccttaacgctgtaaactaggccgtctttggctagttgtgcgattgccttacgaacagcatagcgactgctatcaaattctgtaattaattcgtcttcaatgggtaatcgcatcttaacgctgtagtgtcccgtgagaatgcggtcctttaaaacgtgatagatgtcgctgaatgtttgtttccccattttaatacccccgctcatcatataattaatttaattaggaaaaatgcgtagttaaccgcatttttctagcacatcgtaatctgccggttattcacaataattttaccttccaaagctaactgcttaaattgacggctgagcgtctccggcgtaattcccaaaatattggcgagttccttctttttaagtggtaattcaaagacgacttgtccggattccaccgcgacatcccgcaaataagccatcagacggtcctttgcatccaatagatcacggcgcatctgatttttctcgacttcaatcaattggttgccaaaattgttgatcatcgctaacgataaactcgctgattctccgagtaactgctgaaaatcagcgtattgaatggaacaaacccacgcatcactagtcgcttggatgtagccctgattttcatgcggtgcaaataaccagcgctgaccgaccacatcaccagtatgtagtaagtcaataattttctccttgccattatcagctaacgcatagacttgggccgtcccctcgtccaaaatcagcatcccttcttggtggtccagcggttgtcggatcagttgacccttttgaaaaaacttgcgatggtgcgtcactgtaatcaatttagttttaattgtcggtgacagcggcgcgaaaagtggcgagcgactgatacaatccatttttgagtgcataaattttcctttcttgacatatatcaattttaataagtttagaatagcatataatggacttataatgaagaattggaggaatcattcatgactaaaaaatacgttgctaacatcgtaccactaaacgcagaaggcattggaacggcaccccatggaactgccacctttgttgaagacggtgaccaattacacgtggcgattgaaatgtttgatacacctgcaaatacgcaacactgggaacatttccacggttttccagatggtaaggcggcccaaattgccacgatggcgcaggatgccaatcatgacggatttgtcgacttgccagaaactgaaccagtctcagggacaacgatggtgccatttgacaacgccccgcatcacatggacgtgccaaatgataactacccagtcgctgacgcccaaggccactttgcctacgaaatcgatgtgccattagctgatttgcaagcgaagttcaaagaagtctttggtaccgatgacttggaactcgacaaacgggtcatctacattcacggcgtaccacaagacttggctttaccagccaccgttgctggtgaagttggcgcctacgatgcacacgtcaccttaccaattgcggttgggaagattgaagtcgcagactaacctaaaatttgaagtaagctaaaacataacgaccggatgagcctatcacatgacaggttcatccggtcgttatgtttatttctttagactatcgacggaagccttgaaaacgcgaaatcgattgacgattatggttccgactggcgaagcacgtccgttaattgttgccgaaaaattggcgtccagatattccgataacctaatcgggttggatgagcgtcgtcgaccattgctagtggttgggcgcgattttcagctttgaccactggatcttgccagaggtcaataatcgtgaagtgccacttttttttgtaagactttcaattgctgcactaatttaccataattcgcatcgtgttttcgcacacaagtgaagaacacgattggcaccgcccaatgctgttgaacataggccacgattgtttcaatcgctccgagcgtcgtcgtttcgtcaaagccgtggcgctgttgtgcacccgtaacttgccccatagccttgtcatgccgcccatcattggttgaaagttggcagacaaaagcgtccaatggttgggtcactggaatccgatgatagagccgctgcacatagctatctggtgcgttacctgctaaagtggtgccactcaccgcttccttgatggcaatcacgccatccgtcgcgacgagataatcgacgaacgaatcttccagtgcacccgcaccggccgtaattgacgatcccagaaatgcaatccgccgacccatcaacggtgacttgggattcaatgtttgatggctaggggcgtaactaggcaaattgcccgcaatcaaccgccccaccatcgtctcacgctgcaactgcttattcaccgttccgaccttgattgcctcctgcaacaactgcttaaattcttttttgtatcgaatcatattaaaaaatgctcctatgctattagtttacagggcagaagaaaatctgtccgtaaatctagcataagagcactggacttgaatctaaattagcaaagggatctcattctataaaagtttccgatagggaaaccaatattactcttgttgagggattacttgatccagggttcatttttagcaaggacgaattaaaaaaatatagcgatggacagatacttaaacaaatacttgaagacagttctggcgaaacagaacggtttgaatttaaacttggtttgtattcgttcaatccacagacgcaaaagaaagctttcaacacgaaactagtatccaatataacaaaaaaagcaacttcttttgccaatactccgagtcataagagttcttacatcatgattggtgttgcagattctgattcttataacgcatctgaccttggaacagaaccatttaagataggacctatttccattgttgggattaaaagagatttaacattaagtggaaaaagtatcgatgagtattatcaacattatttctcagcactatctcaagagtctgttagtgaagagatgatgacaatgttaaaagacataaaaagttatacctataacggtgcaacagtattatccattaaaatggataatactgggaaacctgaaccctacaatggtaagtactatcgtagagaaggcactaatactgttgagctaaatgtaccagacttaatatgtctaacgcaaaatttacaaaaacatatggatgattaaatctgatattagaaaaagcaggacttattctattttaaaagctcaaaaaggccactagggtataccctaatggtcatttttgtttctgtgctatactaggaattacaaatgttcattagaactgtccaaaaagaagtgctgacaatgatataaaaagcttcccagtaacaatattactgagaagccagaagaaattatatgtatatacatattatgacataataaagcccctttttgctattggctctagcagaaggggctttgtgttgtcgtaactctttccatatgggaaagaggcggtccaattggactatgcatcacaatatcctacagctgtattataccacgagcactaagctgttttcttttcgctttcttttcattgagctagatttctgcccatgcatgattaactacaagataatctagacagtcttggtcacgattagtcgatgtacgcttattttagtaagcgtacataactttcggttgctatcgttcccattccacctaagattgtaaaaaattgttgcattttaatttacccttcttaggactaactatgttataaaaagtaatattgataagttatactaaatttttaatcttgtaggctaatcctgggaatgccattaacattttcttcttccagtcatctggttgcacatccaaactcatcactggaatcagattattaatgtcatctacagcagtctggctaatttcggaagctccctttaatcgtccagttttcttgtcataaacaatggttagacgagcattatcggctgttccttgatagaaaaagtcacccgctgtaatatcaatatcttttataacatatttctcattattacgtgcttcatcaatatttataccagcttgtgctacttgagggaaggtaaaggcaactgtcccgattactgggtattgaattggtttcgtttctttttcagtaaagagagcactcagataatcaccttcaaattgagcagttggtgtcaagcctggcaccttcttactgagcacatcaccaagggcataaatattttccgaacttgattgcaaaaaaccgtttgttttgatcccatcttcggtcgcttcaactcctgcggcagagagattaagcgaacctaaattaggaactcgaccacttgcattaaccactgtatcaaagttacttttatcaccagtcgtggtttcaagttgatatccactttccttcttagtgatcgcctttacgctagtattgaatttaaattcaattcctaacgagtccttcatttcgttcacaagttgttgaacatgttgtgagtagaacgaccggaggggacgatcggaatgttgaataattgtcacatctgaaccagcagcggtaagtaaagtagcaatctccatgccaacatagccgctaccgattatggcaatacgctttggtaagtcctccaagtcaaaaatatctgtactagttagcgtatattcttgtccagggaaagataattgacgtggtgtgcgtcctgtagcaataacaaaattatcagcctcaatcacacctgactccacactgatgtggtgtgaatcaataaaagaagctgttcccgtcaatgtttgggcacctaaaccctcatacatttgctgtgtgctcttaggaaatggtgcgaatacttctttcttgtattgaattaatctttgccagtttaacttaccaggagtttcaattccctttccttctagctttcgtgaggtaagaactgctcttacagccccttctaagaagatctttggctcgcacccctcattcgggcagattccaccaaaacgctttttctccaccactaggattttctttttactatccttcattcccagcaagaaacgataaacagaaggtccacttccaactacgacgtaattaaacttttccattaactattcccctcgttctaattaatcggtatattgagaaagaacttgcttaagctggtccttgctgtgaaggccaaccagcttctccatgatcttcccatctttcttaataatcagggttggaatagacatgataccaaactcagcaggagtattttggttagcatcgacatccatcttactgatcttgaccttgtctcccatatccttatcaagttcttcgataattggtccctgcattcggcaaggagggcaccaagtagcccaaaaatcagttagagttactccagtattggtctctttcttgaagtcttgatccgtcacatttttaatcatgttatcttacctccctagtccttcttttcatcattctttttcttgttccagtgatcggcaatactgcagccgttgggcccacatgtgccactatcaccttgattatcgccgacaacttggaatggtgtagttacttccttttcttccatgataattatgcctcctcttcagcttgaacctgcttaagtgctttaacgaatacttcatatggttgagcaccactaattgcgtacttattattaatcacgaaaaacggtgcagcatgaatacctgattgttgggcttctacctcgtcactaatgacatcatcatgatatttatccgaatctagcacggcctctatttcatctttagctagtccagcatccgttgccgcattaactaaaacatcatgatcagcaatcgaggttccatcactaaagtaaacttggtagaaacgtttaataactctttctgtaagtgcaggatcacccttactgccagctaatttaattaaacgatgagcatccatagtattagtagggacaaccttattaatttccatcgataatccatctgcgtgcgccattgactcgatataagccatttgctttttggcctgaggctctagtgacttatttccctgagtaaagtgattaatatacccttcagtagttacttttggcgttgcagggttaagctcaaaagatttaaactttagttctgtctcatcgtaaataccaatttctttcatagccttcttcatacgattagagccgatataacaaaatggacaagcaatatctgaccaatatttaatttccatctttaattctccttcttaattaaaattttcaacatattcatatgcattctgtccagcaattcccccatcaccaacagcagtagtaatttgacgaagtctcttcttacgaacatcaccaattgcaaagacacccggaatatttgtttccatatcatcatttgtcagaatccagcctgctgagtctgtaatatttagcctcttaaaaagctgactgttaggtaagttaccgatataaataaagattccgtctgtattaataactttcttttcatttgttttagtatcgacgacctcaattccggtaacatgattttcatcaccaataatcttttcaactgtcgtattccaggtgaaattcatctttggattctcgaatgctctatcctgaagaacctgttgggcgcgcaatgtatcacgatggtgaactacatttactttgttcgtcacattggctaaatataagccctcagaaatagctgagtctccaccaccaattacggttacctgcttacccttaaagaaagcaccatcacatacggcacaataggagacgcccttgcctgaaaattcctcttctcctggaacacctaattttttattagtcgatccggtagcaataataactgacttagcggccaactcttcgctatcggttttgatatgcttccattgatttgaatcaacagttacttcttgaacatcaccacaaataaaattaactccagccttgaccgtactttgatacattttctcgctcaaatctggacctttaattgatgtgaacccgggataattttcaatatcatccgtattattcatctgaccgccgtatatgccacgatcaatcatgccaactttaaggtttgcacgagcagcatataaggcagctgtcattccacctggacctgcaccgattacgagtacatcatatgtttccattatttagtcactcctcacactctataaataataacgaattactgtctccaattgattttgatctataaaacgtgatatccgttctaccatctcatcatttttaattaatatgatgcttggcgcagttaacacattgtatttttttaccataagcgggttattatcagcattgagcacttcaacttctaattgatcatgatatttaatggcaagtctgtgaataattggtctttccgtatagcattgagcacttcaacttctaattgatcatgatatttaatggcaagtctgtgaataattggtctttccgtatagcattgagcacttcaacttctaattgatcatgatatttaatggcaagtctgtgaataattggtctttccgtatagcattgagcgcaccaatcgttctcaaagaccaacattttaagtttaggtatgtctagcttaaccatataaccaatatcacctcttatcaattcaactaattcattgaatggttaaataatagcacctactttttgtaagtgcaagggtaaatttctgtatttaaattacctaaacaaaaaagtgaccggtaaatcttccgatcactttttctcgttaatacatttcaatgctcttttccaatcatagtaactataatttaagctaagcgcattgtagccattattatttaataactgcgttgcaatattcgaattaccacataatctaccacgacaataaacaataatttgccgattcttcggtagttccgttagatggtctgataaagtatcaagtgggatatttatagcagaattaatatgtccttcttgatactcatcttgtggacgaacatctaaaagtagtccattcttataacttttcagtgcttgttctaaggaaatgctttttacattttctgaggttgtggctttatgttgaataactttcatttcagaaagctcgttttcgccaatatcagtaagcagttgaattagtttcgtaattaagggtgaactcaggctgtaaatgattcgattcccatctcgctcagtttttactaggtgactatcccttaatacttgtaaatgccgtgaagtattagcaacactaatctttaattcttttgaaatttcttctacactcttgggagcctggattaataaatcaaggatttccaaacgacgatcactgccgaggctctttcctattctggatagttctttgtaaagactatctttgtactcaattgcttcttcgtacataatctcaccactattcaaataatttattgaatagtttatcattattttaaaactttgtatagtttttctttaaattacgctcatttaccctattctataggcttttcattctgctagaatcttcaaataacgtcatacaacatggtaaccatctatctattttgctaaaaaaccgatgagtttcattaatttgcggccaaaggaattctagcatttattatgagcttatcttgctgttgaaacttatttaaatggccaatagtcagttcatctggataaagttgtcaggtgcttaactacaggaaactacgatgctttttaataccaattaagccaagcaaattgccgagtattactaacaaaataccagcaaatgatattgtttgatttccattattgtcttcacctgttcggggtaatcttgaggtgttgttagactgagattctgtactcgtggatgtattgacaattccattcttggtagaattatttagttgacttggattgtcgagttggtcaaaactaggattttcttgacccttaccagtagcagacggatttcctgattgagtagatccagtatctccagtgccgttcccaccagcaaccggattcttggtgtacacataggttacggtctgatcctgagctgtgaaactacccgtaggggtaccttgaacttctttgaaggtataaccagcaatatccttttgggttgtcgagtaaggggcaccaatattaccagaagaaacaacattgtcagcaatcgaattgccgctttcatcaacatacttagctgtgccgttcccaccagcaaccggattcttggtgtacacataggttacggtctgatcctgagctgtgaaactacccgtaggggtaccttgaacttctttgaaggtataaccagcaatatccttttgggttgtcgagtaaggatcaccaacattaccagaagaaacaacattgtcagcaatcgaattgccgctttcatcaacaaatttttcagttagtttcccaacactgttccaaatagaagcaattggattgatagttaagttactgatgttagtcgttccattatctgaatacacgtaaacaccatttgtagcttgatcaccaatattttctggccgcataaagaagttttgggttatcgatttttcgccattattagcaaaggcctcaatacttgtttcgtcaacataaaccgtaatcgtaattgatccatcagcattcactgttgcgttcattttgtctcgaggtgcacccatattgggttcaccagtgctgagtctctggacaaaaaataatcccgtagtcaaatcataaccaaccaacatatcatactttttatcatcagaaacacgaagcttaaagccgactgaacttggtttattgctctcatcccaagaaaatgtcgcactaattttatattgtttgccatcatattgaactttttgatcattacttgaaattgaaaagttactgtccttttgatcaataacattggcctcttcgttgttagcaatttctttgaccacagtatttgccaacaagtacccgtctgttgtatcaggactcttttcaagattcagttcgcgaggaagagtcatattaccgtaccaaggtgttgtgttagcttctcccgtatagctccaattcgactgccaagccaacataacagttcgaccatcgggcatattggagaaaggaataccggcataaaagtcttctcctgagtccattgtcattggatcttgaagcgtcttcgagctctcaggcatccaagtcccatcagcggtcatattgccaacataatattgcatcccagatcctgtggcatgtgcgccttgttgaacactgacacaaaatacccactttgtgtcatttgttccagctacctttattggtatcaatgatggacattcccatacgccgttacccacatcattttcacgttcaattttagaagcatatgtccagtccaacagattgctagatttataaatgagggcttgctggccagacacaacggttaaatagtattgtttattaaccgcatcgtagactacgcttggatcgcggaaattcgcggcatctcctccctggttcatgctggttggaatgattgcctgaggattagccgcattaccatccttcgaatattgaataaatgttttgccaccatcgaggctgtaggccaaatgttgctcttgaatctcatttactccaatccaagtccctaatccaccttcagcaccgtcattttttctagtcgcaatctcataatcagctgtgtaaaaggctaatatggtccccttacctaacccactaacattattggcatcaaccacaatcgaaccgctgaatatagccttactatttggtgtagttccccagtctcctgttggatccccaatatatctcactgttccataatctttgagatttcccgttgtgttagtatacgtaaagtcttcccaaccttgattctctaaccaaggaatggcaacatcttcttgtgtccaattaattagatccttgctgacggcatggccccaagacatattgccccattggttcccctttggattatattgataataaagattgtaaagtcctgtgctactatcataaaagaggccgtttggatcgttgatccaattttcattactggagtaatgaaattgatttctatattgttcatcatactgatcattttgactgatatcgggggttgtagcctttgctgaattgtcaatcgctatagtggtaattgctttggtggtaattgctttggttgcaattgttgtggaagatgttgattggtcagtttgagattgccctacactactttttgcttgttcatcacttgtcggcaatgtggtattcgaattgacaatagccttatctgaatcacttgttgtaacaggttttgtcacatcagtattgttagtgctatttgaggctacttgatttttgttatcatctgtttgactgactgtattactggctgtattactggctgtattactggctgtattactggctgtattactgactgtattactggctgtattactggctgtattactggctgtattactggatgatgcctcactgtcgcttgaactcggcaaatcaacttgttttgatgatgctacagtcggtacgtcattgactgaaagcgattgagtaaccgactcatctgttgtaacatcgctagtctgagtgttgttttgactaatttgagaagacgaagcgcttgtcgcagcgcttacattttgcccaccattaaaaaatgaaacgataagacatgttgataagcaggcaaatacccacatgctcttgcttttatacatcttatagtgctgcttttcattagtcttcaacctaattaccctcctattttttaacagctcattcacatgagtgttagtcaccactatttattcttccatcacagtgagctacacccaaaaaatcgttgagaactgaatctcaccgacttctcagtcctgccatagttgcactgatcactgataaatgaagcacctacaattaaagttacctgtaccaggagctatttgactttgggcgtaattcctgtctgctgacgaaccttcttttgaaaatatttgattttctggtcataatcgtcaacaactgcacgaatattttgctgtcctttccagcctacataactgaatgtaatggttagtaaagcacccaaaataaacaagctgataccaagtatatataaccataaattttgatgatataaataagatataacaataccaattccgctagtaactgttccgagttgaatccaatagcctaaatttttaagcatatgcttctgataagcaacttcttcttcataacccgtcttcatttcttgaattgtcatcattatcctcctccctggtaacatcatttacttattttaatatgatagtcccggattaaagaaaccaactaatacaccaacaagcgcaattactacgagaattaacattgtccagattgctgatacatgtttttttgtcattaaccaccaacaaaagaaggttacagccaccgttaacaatcctggataaatactatctaatttatcttgaagatttaggaacaccttaccattagccccagttaatttaagtgaagtcgtaacgcttacccatgaggctaaaacgccaccaacaaccatgcttccgacggttccaatagcatgtcgaacagctgcaccttgtttaccaactaaaaagctaactgcttgatcaccaaacttatatccccgaaaatataaaaatcgttgtccaaaataagcaatgagtacccaagcaataatatagaatattgcacctaatggtgaaccaccacttgacatacctaatgaaatccccaacagaataggaattaaagtaccgtcaattaaggaatcaccgataccggcaattggccccattaaacctgcccgcatatcgttaatcgtttctccatcgatttccttaccatcagcgcgtgcttgctccatactagccgtgattccaacaataactgtccctaacattggattagtattaaagaaagcagtatacgccttgatggctttaacttgatcttcatgcttgggatataattttctgagaattggcaacatagatgccatatatccaaatgtttgcatatgttcttgagaaaagcatgttagtgccccccaaaaccaacgatgaaatgactttgtcaatgtcttttgatcaagctgattatgactattaattttatccatgatcaaatatcctcctcatcgtcgctattacttggaccatcagtgacagcttcagatcctgatgtttttgccatctcaacttcatacataataactgcaaataatagcgaaataaccgtaactgataccaaattaagtttcaatgaagcagcaagcgtaaatcctactaaaaatgggatgaaatctgctgcccgcccaatgatttggcgaagtaaaatagcaatcccaacacatggtaacattccaccaactgtgaatagtgtcttcattgctatcccatccataggcagcgcatttcgtaatgccgttaccgctgttgcaccataataagttaataacatggttggtaagaaagagaaaatcgcatgagaaatccatggccagccaaaattaactgccgtcagtttatccaacttgccactatgaacatctttccaaccaaaagattgccataccaagttcatagttgcgactgcgtaatacaaaactgttccaactgtacccaccaaagttccaactgattttgcaaggttagcagcactaccgccaagcggattcaatccttgagaagcaattgcgaccattgccaatggaataccaatataagaaattgcacgaacatcagcagatactgtcccaccgggtgtcactaacgcaatgtaaaccaactgcattgcaacaccacaagcaataccaagttgaagatttccaagaataataccacaaacaagaccaccaactaatgggcggccaatcgtgtaattcccaactgcttgaccagccatacaagaattcgagcataaacaagcaaacagacctaatagggctgcttgaagccagctaattgtcattttaaaagcctcctatcctttctcaatcattgattaatatccgaatctcgatttaaatttattccaacctcctaatcgttgatctggtaataaagcaaattccacgttatagccattcttttcaatagcttcaaacgcatcaccctcagactgtgtaaaggattgattatctcctaatttaatcgcaccttcccgatcattacctggaccaacaataatcgtcttaatatcacctggtttaaaattcatatccaccaaaattgttttcatatcttgcgggtttttagtaatcaaaaagtattttgtttccgaactcaaaactttgtctctgacttggttaaagtgatcaagggtccaaacaaaagtttttttatccgatgcagccttataagcctcagctaaaatagcattattagctgctttatcgtttactgcaataattccatcacacggatactctttaccccaacggacagttataagtccatgaatcatacgatcgtcaatacgaacaaaagaaattgccattttaatatttcctccttaaatgtcttcatcagatggtttcaatattccattcatatctaagggcctaatggccttagttgcttctgaaagaagcttactcttcaattcgatattatctaaagaatctttaaacatcattgcggttaatgccattgggaaattcatccccccaataatgatgctatcattgaattttttttgtctatttaaaacattacatactgtggtaaggggactaccaccaataatatctgccaaaataacaaactgagaattctctggtattggcttcatagtagtatcaattcgcttatctaacgtatcaatagcttcatcaggttttaaaccaatggatatgactgtattagttgcatcacccgcgaacatacttaaagtctgttttaaaccattagaaaaatcaccgtgactaatgagtaacaaatacttcaattcactttcctcctaactcaagaaatttttgaatacattttctaaaaatgatacctatcatcatttattagggatagcaccttctttatcattaaataatataagcaacttcgaattcgaactagactgaagaatagttagcgcttacaatgtatatattaggcatataaatataaaaagtcatcaaaatattgtgcttaatttcagacaatagtgcttaaggggtggaaattttgaatgcaatagaaaaactttatgcggtcatcgcacaacaatttcctaacgttcgtattactacgaaccaagcagctcatgcaattgggctgacacgtggtgtaactagcagttatctatcaaaattagaaaaacaagggcgattagaaaagtctggcagcagaccagtatattggcaaattaaacatagaaagaatgcttttgataacttaataggctcatatggcagtttaaaatctaatattaaaaatgctataggagccattgtctaccctagccatgggttaccggttcttattacaggtagtcatggcactggtaaactattatttgctcacgccatttacaatgaagccatcagacgtaaaatcttgactgaaaaggctatttttaaactaatcgattgtgaagattatcaaaatcagttaaacgtgctgaaaagagaattgaaaactatttctgcccagtctaacaaaatcaaatctgaagatagttacgtgtgtattaaaaatctacagacatttaagcctgtagatcagcacggtttatttacttatattatgcaacaacccgatagtaccgttcgttatattttttcaacgactaatacaaacctcagtcttcaagataacatatatttaaaaaatgctatggtgagaattgacttattggaccttgatagcaggccttttcatgagaaagttgcttttattattatgttcctacaacaacaagccgatcaaattaacaagaagattttaatttcaccatctgaacttattaagctggccaagcttagacaagctgataacatcagaggcctgcaaaatacaattaaactactggtagcgtcagcctacgcccgatccttaaaaatgaatcagttagttattggtttagatgtaaatcatgctatctccatcatacctaaccagaatttattacaaactagcataactagggtagtcaacaatatcctacagcttaattccaactcacacactttactcgcaaaactcacggattcacttggccatagtgaatctatcacagagcaaaatttttatgtgcttaaagtgcttaagcaagtcagcgttattactaatgaaccggtattgatcagcttagcaccgacatttcaagaggctgtccagaagtatattactactccctatggcattaatttcccacaaaatagtaacttttggaatcaggttgctttagctttcatctatgctaatctttgtagcatcaacctaccagatgatgaacaatcctccaaactgcaagaagctttaagaaatcattacccgagaagctactatttatttaaaaaattattgaccaaaattgaacctcaatacgtaaaaaatagttatcattaccttccgtttttcatcctgatggcatcaagcacagataaaattgaatctgtgcattataacgctattttattagcacatggagaacaaactgcttctagcattcaacaaatagcgaatacattatgtggtaattacttttttgaagcctttaatatgccaatagatatttccttgggagaaattaatacttatgtctgtaattatttgtctgagcaaggtgattctgcaaaaggaaatattgttctatttgatatgggatcactacaccaaatgtttaaagaaattaagaaagtttctgatcaagaacttctagttgttaataatataacaactgcaatggcgcttgatattggtcttcagattcaacgcaacgaaccatttcttgctattgcagaagcaagccagaaatacggtgctactactgattctcaatactatgagggattatcgaacaaacaaaatattattgtttcttgcatgtcaggagtcggcttatccaaggaacttaaaaagcttattcaaacaactctgtcatcatccttagaaataattgctctagattacaagcaattacacaatttattaatcaaccaagatcatcaatttttttcaaagacaaaattaatcttaaccacaaccgatatcaatcatgatttagatattgagattataaatgtttatagtatttttgataaaaacacatctttaaaattacaatcaatattgttatcaattggtgaaagttatgaagcctgcaaattattgattgatcgcttactacagtttctttcaattgagggtattcgtggacggttacaaattttgaatcccaatattgtaattgaagatagtcaagacattgttacccattatgagaatttctatgatgttaaatttaatcctagattaaagctcaatttatatatgcatctctcgctaatgattgaacgaatgattatgaatcatacaagctctgataatctgataaaaaaaatggccatgactagccaagaaagagattttttcacattgtctaacggaatctttaaaccgatagaaaaaaaattcaatattgaaatccaaccttatgaaattgagttaatttatcaattgatcaaagattttataaaaaataaaaattaagacgtaatctaccattttaccaaaaggagcagagagactgcaatgatatattgctactatctttaatccatttcgtttagtatcctttactatatataataaagaggcctctaatactagtgtttctgtcaacatcattcataccgtccaatgataagacatggtcacgagttggcataaataagaatcaacaattcccgtcattggcgatagatttaagatgacgttttcttaattttgaatggtgttcatggccttagttaaacttttcttgtttctgccaaattgattcaattcagtaactatgacaacaccaccttaacaaatcataatttggataatagtatgttccatttgaaagctaagccttataattagcatagggttaatagctctaatcaaaatacccaccaaaggcctgctcaactaacaattgagtaggccttttgtagtacaaattaatccttatcacaactaacctcaatagcacaacaggtataaatagtgcctaaaatccctaaataaatttctctcacaactgtttaataaagtagcaatccccgttgtacgtgattaattaaacattcaattcttaaattaaatcaacttaaaccgtcgctgctgcgtgcgtttactaatccccgtctttcgttcaatcatcttataagtcatcccctgttgtcgtaactcataagcaaatttgatttgttcctcagaatacgttttcggccgtccttcccgaaacaacggatcatgttgcttggcatataatttaccttcttgtgtgcgcgtgacaatcatatcgcgttcaaactgcgcaaaagcactaaatattgtaaagactaattggccagtcggcgtattatcaattaagcccatattcaaaatgttgactttgacattttctttaaacaactcttggataatggctaaggcctcgcgcgtgttccgcgcaaaccgatccaacttagtgacaatcaaagtatcgcctgtttttagaacgcgcaacagtttttgaaactccggtcgttcagtagttgtgccagtaaacttttcctgaaagattttttctgctcctgccaattttagtaactcaatttgatttgctaatttctgatcagtggtactgacccgggcatagccatatttcatctttttatctccttacttatgtcattaagtaatgacacggttctaaccctttaattatacagcatcaaaaaagaggccacaactgttaagttatgacacagtttatatattcatttagcagacattaaccaatttattaataaaaactggacttagaatgcgtttctcaaacgtcaaaacatgaaaaaacgcctatttctaggcgctttttacgattattgttgtaaagtttgttgggcttttttagctcttggctttttcaaatctggattagcctttgcaaagtctttcaaatctttttgtgtttgctgactaatttttttacgaacttctttaagctgtgtttgcaaatgctggttgttatctggtggattgaagtcaatatttgagacagattttaagagacattcagaaccgcgtttaccttccacagctcaaataaatcattaatcgcgattaataacttatttgaaccctggaaagcattaaatcaggcggccatttggctcgtaagtattgcaatttcaacttgtaaggggtctggtagcccagtgaactatgaattctcttcctattgtagaaagcatgcacatattcaaaaaggacggcactggataaacacattcctttttgagggaagcgtgaaaggattccattggcgcattatcatacggacaacccttacggctgtatgagtggcggatatgtagttcagttaaacgttgattgtaatcatcgctggtatactgtgatcctaaatccgtatggataatcaggtccctggtaatggttagatttttaaccgcgctttcaagggtctttaagactaaatcagtagccatattttttgagaacgaatagccgataatccgtcgtgagtgcaggtccatgatggttgataagtaacaccagccattacgcttcgtttgaatataggtcatatcagccgtccatttttgatttaaaccagtggtcgagaaatcctgcttaagcaagttggaacactgttcaaccttggttttggaagccgaagccgctttccacttattgacggtaacggagtggatatccagttccttcatgagccgggaaatccgtcgtggactgcaccgaagctgcagtggttgaagttccagattcaattcatggtggatcttcataacactgtatcgctgcttaaattccgcaaagattcgcagaatccgttgtttcaagcccgcatcttcggcccggcgttttgaaggtttgggggatcgataacgataatactgagctctggaaacaccgaggattcggcacatcttggttacctggtggtgatggctttcttggtgaatgtaatcaaagatattggttacttctgcgcgaggaagcccagggttttttttaggatttcgttctcctcagacagcgaagccagtcgcttttccatcgctttgatttcgtctggcgatttaccggattgagttttggcctggccctggatccacttatgaactgttgaatagccaatgccatattctctggccagttgggcagctgattcaccttgcttatataggttgataatgttttgtttaaattctttgtcgtaacgagttggcatgtaaaaattccttccttttgagagacgatttattcattataccctctcttaaaagttgtctcaggaatcagcttacatccatttatatactttgttagccgacaatatcttgaatatcggcaagctggctaaagaacttagggaagtattatatttttccccccatggtgtacgtccctcatttgagtaagaaaaaaagacctctttcttagctcttgaaaatgcaacataaagtttgttggttatatcattcaaagcacctctatctacttcatcaatattaatggtcgtctgactaactggaattcctagatctcttaaatcattatggtttggaaaatcgtcttgttggaaatttgcaattattacgtagtcccactcaagtccctttgctccatgaattgttgatatagtaaccttagttgtgacatctggtaaactttggcgaagtgattggctacttaaagtagaaataatatgattattgcgaaaagcagacggaaattttttgaccgaactataaagaaacacacgtagtaactcctcaaaggacgttgtatagtctgagaggggtgaattgcttttaacattatgacaaaagtgttcaatctcatgttttgtaataggatgatttaaaaaatttgactggtataattctaatgcttgatattcaaaatctatgaaatttggatcctcggctttgaaagtagcatccattaacggcaggacttgtcttatgtttgtcactaattcttcggtagtacccactccttgattaactaatattgcaactgttgcatcgggatcagtagactgaatatgttggatgagttctataattcgtgatgcttggtcataaatcgtaataccgtgtaacggtttaatacctactggcttaattgaggtatcataaggattatctctgaatttatgaagtgcagtgtcaagagccaacatattaggtcgttttgtgaagcgatagttctttaacaaacgtatataagtaatcctatggtttacatcatcactgactatacgatcaattaggtttgggatagctcctaagaaaccatatatttgttgcatttggtctccgaagaccacacattttgtgtcaggaagtattaatgtgcgaataagcgccaatccaagaacgttagtgtcttgaaattcatcaatacatacagccttgaaaattttttgatacccatgttgaattgaggggtactctttaaaaagattaagtacaaataatataattgcatcgtaggttatttcccccttcttgataaataatgacttctgagcttcaatgtaaggtggggtacgtgtaaaaagctgatctattgatattgatgctgaagatatatcttgttccaagtgctgtattaaagtaagattttctttatcactagatgaaattgaatgaacgtgccaagtatcaatggatttcaatgcattaatgtcttttactccaacaaggtatccatactttttaagcaccattcgacaaaacccatgaaagttagtagtccatatttgaccagtcgttttattaaattgagaggtgttgaagaacacttctgatatgctttccttcattcggttagctgcactaacactgaacgaaagacaaagaatgaatttgttttccggaattttattaattgcaaaccagtagctaatcatcgataccatagtaaatgtttttccatagcctgcagatgcctcaactattagcctgttattgttattagtaataaccgcaagctgttctgggtcttgagaaaatcgactaacaatttcgcttgatgtaatcttatctttcattttatggcctccagaagtgttttcttgtacacatcagggacaactgatacatatcgtgcaataacagagccattcaaaatagacttatttttaaaatattgtttcccaatcaatttttccagaacattatttttaatttttttgatttcatcatcgtcaagcttttcaacatattctttaataaattcacaaacattttcgtgcttgcacactttccttattctatcttttttaaagttttgatcaaaaaaggggtcccaaaagctgccatcatattcgttttcgttaatatactcttcaaagtcggacaaataacaatttatgccgtttatgtccatcaattttaggcattcatattcgaaatccttttcttttgtaacatttgtacgcagatatcccctgtcttgtccgtcattgtcaataacagcatgattgtttatacccagtgtctcaaaaagttcttgaagaggaggtatattcttaacaccgccagatttaactatatcaacattatgattaacaagagaaattttcaaacgttttgcgaaaacgggtatcgcactttcttcggtgtcgccctcaactaaaataaccccatccgaaaatagcgaattctttatatatggaagctgcatttcaagctgttttttttgtctcatttttaattgaacatcactacctgaggtgattttcaattgattattaaagattccatagcgaatatatttatgataatcgtcagataagatatacggagaatgtgtcacaacaattaattgacctttaattttgctgatattaaacatttcttttaaaagggtattaaagttttcatcattccctgctaaaagattttctatatcttttatgacagaccgctgtaagttaggatgtaagtgtacttctggctcgtctaatccaagaattatatttaactcataagtatcttcatttaccatggaaagatgttcatctaaatgaccataacgtgaccaatatataatttggtccaaaatcgctaatggaattagactcgaaaactgaataccaaaccccattttggagaagtcaatgccccaaggcccttgaaccttcagtgtacgagtgatgtaatctaaatagtttgcttccagccccactgtaacattgttacttttaaaaggtttaattttcataagccatttattaatatattcgataacttctttatctgttttggttggggatatattgtctatgtttctattcaataaaaatcttttcgttaaatatggtatcaatttgtaattacctgcttgttgagttagatcgttttctttaattggtttctgacttgacgaaaacccaatgtaattagtaaattgaatttgtttttttgaaatctggtccccagttgtttttgatgtgattattatttgcgaatctggatcttcctgtttaaaaacaatcgtgatttggttatcttcactttcagaaaaatcatctccaaaaaagccaacctcactgttcttcaagtaaatggtagctctaactagtattggcttttgatcgtttagaaaatctgattcgtaaaagtttttccctgacaatattgtattaattaggtcaagagtacttgttttcccaatgttattcttaccaacaatataattaccattactattaaagcttaactccatgccatctaacattctaaagtttgaaatacacaatttcagtaatttcattgttgtattgctcctctaatttccctaattatcgatttgggcttccacttgaacaagtctaatgacatctagaattctattatatcacgaagtaaaaaatgaccattaggtgtaccctagtggtcgtataatttaaacttaattagttttaaattttcctcgaacagctttatacaagctccattcttgctttcgtttatcagtagcactaacttcgatggaatttgtttcatctgcattcctataatacgtattctggttgggataccctagaatcgcttagtagtcatcttgccctagattgcaataataaagttaccacctagaaagaggcttgctcactgcttgaactggggtttgccaacggagacattttctaggtttgttattgataagcgctgtggcttgttgaatatcggtctctgaaacctgatcaaactgtgttcccttcgggaaatagtagcgaagttctcgattgaaccgttcatttgtgccccgttcattcgggtgataggcgtggcaaaagtaaaccggtatccgatagcgctttgtaagcgcctgatcgcaggaaaactctttaccgtgatcaaccgtcactgatcgaattggacccggaaagtccaccatcagtcttgcaaatcccttgagaacagcattttgtgataagttttcaagcttagttgtcgccattaaacgtgtcacccgatcgacaatggtcaaaacagcagcctttgacccgcgaccaccgcgaactgtatccatctctaaatgtcctttttcggttcgccgattagctgactcactgcgaatctcaattgaggtgcctactgcttggttatagcgcgaccgaaggtcttgtcttcttttatgacgtttaccgtgatcaaagagttggcttggctgaaaatcgacttgtctttgataaatccagtggtaaatcgtgtgtggcgcacagtgaacggcataaccgaccatttcaggggaccaacctaggtttagcttctcagttaccatccgcttcaacttaggcgttaaaatcgagtgccgaccacaacgatgccgacaagtatcggcatgatcctgagctataatggcgcagtaatcaccttcagggcaacggtgaagctcatgcctaatagaaatacgagagcggcctaaggtcgcggcgatgtattgaatcgtgtggtgttgcatcagttctatctgagatcgttcaattaaggttataatggccatgggacctgtccttctctctagatggtatgttatgcaaacaccattttagcaagaacggacaggttttttttcacattttctgggtggtaactttaattatgcaatctaggaaattagcattatcactactgggagcatgtctcttatctaattgatctatatgaaccattacagggagcggaaagctggttcctgtaaagatagcacttccaggggctagagaagggatagcagattttgaaacactatccaatgaatttaatgtattgcctaacatattcaaatcaacttcatttttattatttaaagtacttaacaaattgtgaaatggaagctgggagaatgtttatattgtgtggatcaaatgcaaaatcaagtaattcgtttatattataatttttttctgttaagttacaggaatcatctaggtaatattgtgcaattcttttattcttgtctccatcaatacttcctgcagttgttacaagccataattcttcattcttattagaaagcaatgatgtataatccttagatttaagagaagtagttccatttttcacttgaatataaattctcctgtttttataggtaccttgtttttttgaggcatcaactaatacaaattcgtatctctgtgtaccaattttgttggttgacggtatcaccacataattgaattgatcatacaaccataaagaaactaaatcttcagcagctgcataaccaattaaattaaatagagaacttcttgtatgaatcattttaggaggcaaaagatcagtcttgtttaggagtattgctgaataataacttgttgcagtatattgggaagtttctaagggtgtctcatgattatcaacttttgtaattgctctcttattgtgtgtatacgtcgatacagaacctggaacagcgtcttcttttccgactggtatccaattaatatcagttaacatagctgaacagtcaaagtttgaagctatttctccaacatcaaaatgaaataaatctttaggtttatcaggtatctcagcgacataatatataccattgcatctgacccaaataaaatccccctttctgacattttcaaacaactgatgtacgctttgatagccccatttagaattccaatggttctcttttatttgtttattccaaaattccttatagtcttcaaaagtgttaattttctctctcccaggaacatttggaaatgaccatccacatgagacacaatggtttttaataaaaaattcatatgattttatatcatgatcacccccaccttttccctttattttccaagcatgtattgtcatcgtaattgtcctcttgtattctaaattattttaataacagtgctaggaacgccaaaacgactatttgcagactaatggttaatggatgctcaaaattccccaaaagttgccgacagttctctaaccaactaaggatcgttcgactacctaacgttgtgaggcatctgtccatgttttaattcactttgcaatgatccctttagcgtcagtcttactattcctacattaacaagaatatcacaaaatgtatttttaaatttacgttctgagaatcagaataactttattggaacagctcttcaaatttaatggttagctcaataatagtttcttattttttttagctttttatctgttttagtcttattcccaaattgcaagaacaaattagccacacgataaatcctattaaatcagtattttcattaatattcatattttatggacttaacttaaccggcggaagcagtggagaaaagctctttgggtgtttgatagccagtttgccggcgcggtaaattgtttagctttgactcaactgcttggatatcatgaggacccaaaatatccatggatagacccttgggtacatcgcggcggatcattcgattatgcgcttcgttagtcccgcgctcagaggaacgatatggatgggcataataaaggtcggcgacaccggtaagtacagtgccaacttccgagaactcagcgccattatcggcagtaactgacttcatgattgatccgtattcttgacagatcttggctagctcatagttgactgaatcggcatcacgaccatcgatcaaacgtagaatttggcagcgggattgacgctcgatcagcgttaagatcacactctcttgaccgttgcgcttgcccaccacggtgtccaattcgaaatgaccgaactcttggcgctggtcgatgcttttaggccgttcatcaatactccgtccggccagacgcttgtgtataaacgataaacggcagattgtaaaattaatccgaacgctgttcggacaaaaaagatcagcttcctttaaaatggtgtttaccacaaacccatcttttaggagctgatcttttgtctagtataacctattctgaacgaattaaaatcgaaaccttttgtgaactagggctgtccaatatccaaatgggcgatcggctaaaacgatcaccgtccacaatttcttatgaattatctcgatgtcaaccttatcaggctgaattagcacaaacagatgccgaatacaagcggtcacgatgtggccgaaaaactaaactgaatgacaaattaaagcaaataattctaaaccatttacgtctaagctggtcaccaggaatgattgctcacgaatttaaactagctactaaatctatttataattggctaaatcaggggaaaattgagttttctttaaatgatctacctgaacatggcgtacgccaacggcgtaaccttgaccaacgttctaaatataatcaatcattaggacgatcaattgaacagcgacccatggtgattaatcaacgtaatcgcatcggtgattttgaattagatacagttgttggccctcgtgggcatagtaaggcagttttattaaccttaatcgatcgcaaatcacggttcctttgggcctaccgattaaaagatcggacagcagcgactgttaatgaagccctaactaagtttctaacaacttttaatggcccggtgcatagttttacggtggaccgtggcactgagtttagtgggctagtatcacttgaagcacaatacggtattaagacctattactgccatgcttatacgccagctgaacgcggcagtaatgaacgatttaatcggaacttacgttatttttatcctaaggggacttgttttgagcacattagtgctcaaggcttgaaaaccaccttactcgaaattaatcagagaccacttaaaatacttgactggcaaacaccttatcaggtcatgctgaccaatttgtcaaaaaattcggattaaatttgcaatctaccatgtaaataaagatcagtctgttaaaatctttgggttttggcagaccggtcttttgttgaagtgaagcaaatttaaacattaagattatttttggctcgtgacaataatcattttgtatacccaagtaattaatcgagcgttgcaagtggcaaagtttctcaccattaaaaaagcttagatatatttagatacaaattttttgacgttttgaatatgtgataattaaagtgtttaaatggaacgaaccaggtcacaacttaacattaaagcgtcgtttgcgcttggtgggatcacgaaaccaacggtcgacctgcttaaagaaggcttagttaacaaggtcatggacgttcaagatttcgataagggtgcggccgactcgatgcatacgaacccgaaccaacaggagatcgatgcgtcctggtacgccgatcctgataataaaggggcgatggttgaccaattagacgttgtgatcctgtccgccttggaaatcgatacgaagtttaacgtcaatgttatgaccggttctgacggtgtgatccggggagccgttggtggtcaccaggacgcggcgacggcgaaattaacgatcatttcagcgccgctggtgcgtggtcggatcgccacggtggttcccgatgttgccacggtcgtgacccccggtgattcagttgacgtcttggtcacggaagtggggatcgccatcaacccgaagcgccaagacctgattgacgccatgaagaaggttcccggtgtgccagtttacactattgaagaattacagcaacgtgctgaaaaaatcgttggtgtgcctaaaccgctagaatatacggatcaaaccgttgccctcgtggaataccgcgacgggacgttgatcgatgcgatcaaggccgtcaaggattagttagtaattgatcattagctcaaccggtcgcgacaagacgccgcgaccggtttgtgtttaacggtataataattaagagaattgatgaggaggggacgcagatgacaacgatatttgagacgggggcaccacaaacgattgcccaggtgttagcaaacaaggacgcgcgtgcggcgctacaagctcaattggtggcaaccaaggcgccagcgaccattgtcgtagcgaagctcaacattcccggtccaatcaaggccaaccaaacgttgagtcgggtctttacggcgggcatggcagcatggcaaaaccggctggcaacggcggacgtgtcgcagaccatctcggctgactgggatcagccgaccgggcgggagcagtttgaagtcgttgctgagtcggcggccgtcgtgaaacggttggcagttcagtttgaggaccagttcacacttggccgcttgttcgacctggatgtgttgacggtccaggacggtcaggtcaagccgttatcccggtctgattttgacttacccgtgcggacctgcttcatttgtggccgaccagccaaggaatgtgcgcgttcacggcggcatagtgtggccgagctacaaacgatgatcagtcaacgcgttcaagaattttttgcgaaggaggggccgaccgatgcttaagggcgatcaacagttacccgcgctagcattacgggcgctgttatacgaggtttccgtgacaccgaaaccgggactggtcgatccgaccgatcccgggccccatccggacatgaccgtcttcacctttattgatagtgcggtgagtttgcagccctacttcgagcaatgccgtcaagccggccatgattttgagggtgccgatctgcggcaattatttcaacaaattcggccagcgggtgtgcaagcggaggcgacgatgtttgcggcgacgcggggggtcaacacccacaaaggggcgatcttttcgcttgggatcctggttgctgccagcgcggtcgttttgcgacaggctcaaccgacgatcgcggcggtttttcaaacggtgaaggcaatggtccggggactggtccatcacgatttaggagcccttaatcggcagacggcccaggctgctggtgaacggcagtacttaaagtacgggcagggcgggattcgtgccgaagccggctatcccacggtcgttaacgtggggttaccctttttacgggagcggcgggggaccatcaatcagcgtttgttggatacgctactgatgattgcaagtcatacgagtgactcaaacctagtcaagcgggccaaaccgttgagattttaccgtggatgcaagcacaggcacagcggtactttgacttaggtgggagtacgactagtgaaggctgggccttcttaacggacttgaaccagacttttgttgcacgcaaccttagcttgggcgggtcggccgacctcttgattctgacaatttacgaggccctcttagaagggacgttaacggcggaataagcgttaataatcagtaaaaaaacaggtttgtcgaattttttcgacaaacctgtttttttgagttttatgcgtgccggcccagtttgttatcggtgatcaggtcgatcgtccggttcatctggtcacggtagtcggcattttcgagcaacatggccgcgataatgtctagcgcgtaggtgatggcgaactgggagttcacgaaacgcgagttattaacgaatttactattcttcacttggatggttaaatcgctcaaagccgcgaggtgactgttttcatcagaagtgatcgaaatcacttttgcggatttctttttggcgagggccaccgaattattcacttcgtcggtttcccccgttagttaaatggcgaggatcacgtcatcgggctgcataatgcccccgctgatgtatatgacgtgcgtatcggtcatcgaaaacgcggcgatacccatccgcagtaagcgttgggtcatttcttgagcggtgtaaccggaactgcccagtccgaacaagtagacccgccgagcatgggagatcaagttgacggcggtctgcagttcatcagtatagagtcgttcccaggttccgctgaggatcttttggtagtagttgtagacttgatcggcaaccgtgtccgtttgactgacgacgggggccttgggagcgggactttccgctaactggagtttaaagttgtaaaagtttgtgcagcccatttttttgacgaaacgggtgatcgtggcgttgctcacgtccacggtctttgccaagctcgaaatggtcattttctgcacttcttttggtgactgaatgacctttaacgcgactttacgttcctgccgcgaaagggtggggtactgctcttcaactgtgctgacaatgctcataacggcttcattccaatctatttcccaatattaacgctacaataccatagattccgtcgaattcaaataaccaggtcggttagagcgttacttcgtgctaaaagatttaatactatcaatgacgaggtcggcaaaccactggcgatcgatgtggaagaggacgttggcgttgggtttacggttggtaatgtgataatagtcgatcaccgtttcaccagcggtcagttcgcccttagtttcgaccgcgacgttgcaacgttgactctcaaattttgtgggatcgatcaaccaggcgaccgtacacgggtcgtagagtggtaaccccttaaagttccagtgctgatggtcaaaggacatcccgtagaagtcgagcagtccgcccatcacatcggcgaccgggttcttgatcttatggatctttttgatttcttcgggtaataattgggcttcaaagtcgacgtttaatggtgctaacacgatgggaattcccgattccatgacgattttagccgcttcgggatccacttgaatattgaattcggtcgtggggccccagttgcctagacccatgccgcccccgaggattacgatctgcttgatactcgaccggagctcaaagtggaccgaaaggaagagggcgacgttggtgcaggggccggtgaccacgagggttacttttttctgatgagtggataagattttagccatcagttcagtagcgggaatgccctgtgagaagaagtcaggattcggcagggtcgcgccgtcaagcccggtgatgccgtgcatgctgatcccggaaatcagatcccggatcagcggcttagcgttaccggaagcgacggggatgtcttcacgtttcatcagggttaaaagggacatggcattgcgtagtgtttggctatgtttttgattaccggccgaagttgtaaccgctaacaaattaatgttttttgaagcgactgcaatcattaaggcaatcgcgtcgtcgtgaccggggtcacaatctaaaataatatcttccaatgttctcagctccaattaatatcgttaaaaagttggttaagttggcctttcgacggccttcgtgaaaggttgaatataatcgtttgattttcttactattaataattatagtacaagttagttattaatataagggcctgaccatgcacccgagacaaggtcagccggtttaattttgataataaaaacaccagccacgttacgaccgaagtgtaacttaagtaacgtggtcggtgcttttttatcaattcataattattattgaatgattattttttataccgttgttaccactaataattttaacagaaagcggtgcggggtgcaatcaaagtgtcacgatgactttaccatcagggttaccgccctcaacgaggtcctgaccctttcggataccatccagagtgaatgattccaaacgatcaatggaaacgtgtaactgatcattttggatcattaaggcgatggcggcaaaagcgtcactgtcgcggtattcgcgtcgagggatgacctgcttataagcaacgtccggcttggcctgacgatcctgtggcagggtggtcagtgagacgtaggtcccgtggggcttaacgatacttaacccggccgtcgcggcaccactgttagtggcatcgatcaggatgtcggccatgtcggcgaatttagcgctgacccgttcggtatcgtaggctccaaattcggacgcacccaagcccaagacggtttcccgggagctttccgtatcggtcccaatgacgtataacccaagggccttcgccatttgaaccaacatggaaccgaccccaccggaagagcctagaataacgatcgtttgcccctgcttaacgtgggcaatgtgcaccagcgtattgtaggacgtgatcccggacaatggtaagccggccgcttcatacgggttgtacttcttgggccgaagtcctaaatggtccgttgaaaccttaaagtattccgcgtaagtcccgataccggggcgggcgagcacgtcatcgccgaggtcgtactcgtggacgttggtgcccagcttgacgatccgaccgaccgcgtcggttccgagaatggtcgggaacaacatggtgacgctgttccggaaagttccgttacgcacggcaatgtcgaatgcgttaatggcaaacgccgacgttttgacgaggacttcgttgggccgcagttttggcaccgggagttccagctcttccataacgttagagttaccgtattgattaaaaccaaatgctttcaagtccatccctccaaacgttgattaagcttgttgcgccttcaaatcgagcaaggcgttgtaagctaattcgtgatcttcttcatcagttaacccagaaacgatcaagctaccaatgatcccggtgttggtgatcccgattgggaaaccaccaccaacgatggcgaagtctttcgggcttaacccgctacccttgtagaaactgtcaggatcgtccgcgtaaacggccttttcaaagagggaactgtgatcgaacgcgtcgacgacgttggccttcttttggatccataaattattttcgtgcgtggtttgggtgccggcgtggaagaagacttcccgcttgttgatcgtgattaaaatgcagacccgttcaaagtcggcttttccgatcttgcggagactgtcaaccaacggatcaacgtccgctaaattgaagtggctgagcaaagcttggttttcctggtttgcgatttcgtctgtagtgagcatttaaaaaacctctttctaaaatataatgcctattccaatgggtatgacgtatcaaccttttgtggtaagccggtttcaagggacttcttagcagcaacggcggcccgttgtgccatgataacgtcgcggccttctgcaaccaatggttcgtctttcaagattgaacgaacgaaggctttcatttcagcagtgtaggcttcacggtaacgttccttgaagattggaagtggcttttgtaattcttcgttcttgttgttgtaaagttcaacggtactgttgcttacgttttcagctttcagcatcccttcggagccaaagacttcaacccgttggtcatagccgtaaacggcccgacgactgttatcaattaacccgtaagtcccgttttcgaattgaagaacgagggctaaggtatcgatatcatcgatgtccttcaaggttgggtcgattaaagtaccacccttagcatacacctctgagatgttgctgttcatcatgtaacgcgccatatcgaaatcgtgcatggtgaagtcgaataataatccaccgatccgttgaattaaatcgtgtggcagtaagtcagggtcgcgggaagtgactttaacgatttgaggagtcccaatcttaccattgcgaacgccttcgtagacgttccggaattgagggtccatccgacggttaaatccgatttggagtttaacgccggcctttttaacttcgcgtaaaacgtttaagctggcttcttcgacttggttcatactcaatggtttttcacagaagatgttcttcccggctttagcagcagccgtaacgatctcttcgtgggtgtttgttgacgtaaaaatgaaaacggtgtcaactttcgggttgttgaggatgtcatggtagtcgcgggtctgattcgtgattccgatatcatttaaatgttcggaaacgttttcaatgaagacgtcggcaacttgttcgatcacaatttctgggatcgtcattaagttcttcagatgcatttgaccggcgcggcctaaaccaataatacctgcatgtactttttccataatatgaaaccaccttagtaaatatttttaaatagttaatacccaaattaaattattcatcttccggtttaaccccggaagcgtcgccgtacttgaattccatttgaatgagttcaagtgatttgccccgtgtttcaggcgcgcacttataggcgaagataaaggaaagaatgttgaaaccaacgaagatcaagaaggtccaggtcatcccgacagcactgagcagaaccgggaagaagtaaccaactaagaagttcgcaaaccagaggaagaacgttgaaacgcccatcccaaggccccgcaagttttgcgggaagatctctgacaagagtaaccaaactaacggtgaaataaatccttggaagaacccgaggaacatcatcgtgcaaagcacaacgtagatcggtagtaacgggctcttgctaagaaaggctgaaatcaacacgatgagtagtaatgaaatcgtcgtcccaatgatcccggacatcaacatgctccgccggttaacgcggttcatgatcgacatcccaatgaaagtggcgatcacggaaacaatcccgttcccgatgttggcgatcagggccgcattatgggcgaaaccagcctgggtcaaaatcgtggtgccgtaatacatcatgatgttgatcccgataaattgttgcatgacgccgaggccgatcccgataaagacaaggcgccgaatccatggcgtggtcaagtctttaaaggttgcctgcttgatttcactttcctggttcaacgtgtcttgaatctggctgatctcatccttacagtccttttcccgaggccggatccgctttaacgcgtcgagcgcgtcgtcaagtttattgaccattactaaccagcgcggggattcaggaacgatcatcatcccgaagaataacaggacggcgggaatcatcccaaagccgatcatgtagcgccagatatgggagatgtgaccgaaccagttcccgagaatggcgttaacgatgaaggcgagcagttggccagtaacgatcattaattcgttttgcgtgaccaagcgaccccgaattgaaggcgtggaaatctcggacaagtacgttgggacgataaccgatgcgcccccgacagctaagcccaagagtgcacggaagatgatcatcaacagggcgttgggtgcgaccgcacaagctaaggtacaaaagaagaataggactgataggtactttaatagtcgccgccgcccaattcggtcggataaccgacccgctaagacggccccgaacgcggccccgagggtgatcccactggtaaccaacccttcattacttgatgaaaggtttaattcctgcggggtcgccatgtaaccgatggccccattgatcacaccggtatcgaccccaaacaataagccgccaagcgttgagatcaacgcgatgtgttttaaattgtgcccggcattttgattaacttcatcattagtagaagaatccagcgggactttgtcatctctgaccactttttcttcggacataatcgttcctcctaaataacaaaccgttctattaattttgtttatacccttataaatggaatacaagtgagtagctagtggcgccataacaacatttaaacaatcgttactgtgtgaacaaagcaccatttgaattcacctgctattatttcactatggattgtgaatgtcaacacttttaaagaaagcgctttatttgtgaaaataatctttaaaattgtgttgacaaagtctggtatatcagttattctgtaagcgaacaaggaaatgaacatatcgcagatgaaggctgaaattcctccgaaacgtgataatttcacaagcgattgctcagttaagaaatgcttatggaaaggggtatcaacatggaaaaaagtacaaatatcacaagtcaaaatatcacaatcggtattattggtatgggtcgtattgggaacgtgcattacaaaaatttaatgcgaattccgaatgtcaccattaaatatatctgtgatttgattgcgactgatgactggggtatgaaatacaaggccgccgaaaacgtcgttactgattatcacgaagttttagcggatccggatgttcaagccgtattgatctgtgtgccaaccgacttacacccacaattcacgatcgacgccgctgaagctggtaaagatatcttctgtgaaaagcccgttgggtttaacgatgaagaaattttgaaagcgcttagcgttgtcaagaagactggggttaaattcgaagtcggctttaaccggcgtttcgataagaacttccggcgaatcgttgatcaccgcgaaaacggcgatatcggtgatgaacaggttctgaagatcacttcacgggatcccgaaccaccatcgatggattacgttaaacgatccggtgggatcttcatggatatgacgatccacgactttgacatggctcgctacattaccaacgccgaagtcgaccaagtctttgtaactgggaacgtcttgatcgatccagagattggtaaagccggtgacattgatacagcaattattaatttatcctttaagaacggcatgatgggggttatcgacaatagtcgccaagccgtttacggctacgatcaacggatcgaattattcggttctaagggcatggcccatgcggataacgttaacgatagtacgacgaccttttccggaaaggatgctgtcagcggcgacaagccaatgttctttttccttcagcgttacattgacgcgtacaaggatgaactagaatccttcttggacgctgttcgcggcgttcacgatgttgaatgcacctttgaagatggcattaaagcaattcggttagctcaagcggccaagaagtcacttgaaactggccaaccagcaaaagttgaagacatttaaataaacctaggaggttatgataatgagttcaaacgttaaagaagatattaaatggggtattgcaccaatcggctggcggaatgatgatattccttcaatcgggaaagataacaatttacagcaattattaagcgacattgtcgttgccggattccaaggtaccgaagttgggggcttcttcccaggtcctgaaaaattaaactacgaattaaaactccggaacttacaaattgccggtcagtggttcagtagtttcatcatccgtgacgggattgaaaaagccagtgaagctttcgaaaaacactgccaatacctacacgctttgaacgcgccaattgccgttgtttcggaacaaacttacacgattcaacaatcagatacggccaatatctttactgataaggcccacttcactgataaagaatgggatgaagtttgcaaaggtttgaaccattacggcgaaatcgctgctaagtatgggatcaaggttgcttaccaccaccacatgggtaccgggatccaaacgaaggaagaaaccgaccgtttgatggccaacactgatcctaaattagttggcttgttatacgatacgggtcacatcgccgtttctgatggtgactacatgtcacttctcaacgaccacatcgaccggatcgttcacgtgcactttaaggatgttcgtcgcgataaagaaaaggaatgccgcgaaaagggtctgaccttccaaggctcattcttaaacgggatgttcacggttcctggcgatggcgacttggacttcaagccggtctttgacaagttagttgccaacaactacaagggctggatcgtggttgaagcggaacaagatccagacaaggccaacccacttgaaatggctcaaatcgcgcacaagtacatccaagaacacttaatcgaaggtaaataaattaagtctcgtaattgaataacaaacattttataaaataaaatttaagaggagattgtttattatggctgaagcacacgtaacaaaagttgggatcgtcggaattggttttatcggatctgaccatttacaccgtttgactaagacggtcgcaaacgttgacgttactgccgtttgtgatatcgttcccggcaaagcgcaaaaagaattggaccgtcaaggcttacaagctaagacctacgacgattaccacgacttagttaatgatccaaacgttgaagtggttgtctgcaccgccgacaacgaagcccactacgaaatcgttatggccgcactaaaggccggcaagttcaccttctgtgaaaagccattagccttagatgcaaagcaatgcatggacatcatcaactccgaaaagaaactcggtcgtcggatgttacaagttggtttcatgcgtcactacgcaccagaatacgttcaaatgaagaaaatgatcgacgatggtgttattggcaagccattaatgatggaccaacgccactacaaccaaactcaaccagaagaatacgataccgcgcattcgatcatcgaaactgcgatccacgaaatcgacctcgaccactggttagttaacgatacttacgctaacatccgggtcttcagtccaaagcaaacccgtcatgctcaaaacgctaagatcaaagatccacaaatcgtcatgatcgaaactaagacggggatcaacatcatcaacgaagtcttcgttcgttgtcaatatggttacgacatcaagtgtgacgttattggtgaagaaggggttcttgaattaccaacagtgccacaagttgcgactcgtttgaacgctcaatacagtaccgccatcttaacggactggaaagctcgtttcgaaagtgcttacgatattgaattccgcgacttcattggtcacgtttccaagaacgaatcaccagttggtccttcttcatgggatggttacattgccgccgttactgccgatgctgctttgaagtcattggctgaagacggtgctaagcaagacttagacttcccagaaacgccagccttctaccaggatgacgccaaggttgctgaataactaacacacactcctgactggggaggtcatcacaatgcaaaaaaataacacaccgattcgtgctgcgatcattggcctgggtcgtttaggctcacgtcatgctcgtcatttagttgaaaaaattcaaggtgttgacctagttgcggcctgtgccttagaggatgatcaactacagtgggctcatgatgaattaggcgttgaaacgacgtataaagattacaaagaaatgatcgataaagaaaatatcgatacgatctttattgttgcgccaaccccattccatccagaaatgacgatttacgccatgaatgccggtttgaacgtcttttgtgaaaaaccattagggcttgattttgatgaagttgctgaaatggcaaaggtcatcaaagaacatcctaagcagattttccaaagcggctttatgcgacgctatgatgaatcgtaccgttacgccaaaaagatcgttgatgaaggcgggatcggtgacattatctatatgcgtggttacggaattgacccgatttctggtatggaaagctttacaaagtttgcaaccgaagctgattcgggcgggatctttgttgatatgaatattcatgatgttgacctgattcggtggttcaccggtcaagaacccgttcaagcttacggcctgacgagtaatctggctgctcctgaactggagaaaattggtgaatccgaaacgggtgttgctcagctgaagatgaacggtggcgttattgcgacgttgattggtggccgccacgctgcacatgggaatcaagttgaactagaagttatgggatcaaatggctggttacgtgtcggggaacatcccgacttgaaccgggtcacggtctttaatgaaaacggtgttactcgtccgtcactccaaagttttggggaacggttcgataacgcgtttacggatgaagtccaagactttgttaataatgtcgctaaggggactcagcctaacgttactgttgatgatggtatcaaagcgctgaaaattgctaaggcttgtcaggaatctgctgatacgggccaattggtagacattaacttataaaattaataggtattggcctgttgaaggaagaaggctttaacaatggatattagtggaaaaacaaccgaccaaaagggttcacacaccggttttctctggttagcgacgtttatcgcggccatgggatcactgctcttcggttatgatacggggatcgttaacggttcacttgaatttatggcgcaaaagagtcagcttgacttaacggcgttccagcaagggatcgtttcctctgggttaaccttaggggctgcgtttggtgctattattgggggaccatttgccgataagattggtcggaaaaagattttgaccattctcgggattatcttttcaattggtgcgattggctgtgccttcgcaaccaacattggaattttaattgcatttagatttattttagggctggctgttggttcagcttcagccaacgttccggtttacattgccgaaatcgccccaacggaattacgtgggaaaatggtgacgaccgcgcaagtaatgattgtttccggacaattcgttgctttcggtgttaacgccgctttgaccccgttaggtgcgtcaaacgctgctatctggcgttggatgttaggattagggaccattcctgggattattctctggattgggatgtacttaattcctgaatcaccacgttggttagtttcacaaggtaaaatggataaagcgcttggcgttttacgtaagattcgagccgctgctagtgttgattccgaaatgaaggaaattcaagacaaagataaggctgataaagaattaaacgctgaacaagcaacctttaaagaattgatcagcaaacgctgggtcgttcaaatcttgatcaccggggcgatgttggggattatccaacaattcgccgggatcaactccatcatgtattatggtgggaagatcatccaagaatctggatttaatccgaccgttgctgcgattttaaacgctggtaacgggttcttatcaatcgtcggggccgttcttgggatgttcacgatcgactggttaggacgtcggaaacttgaatttgccggattaacaatttgcgggatcacgttagttgctgctggtgttattcactcgacggcgccaaatgccggctgggctggtattacgatcgttgtcttggtttatctttacattattttcttccaaggtactttaggaccagttacctggttgatcaactctgaaatcttcccacaacgttaccgtggcatcgggactgggatcacgatcttcgttttatggatcggtaactttatcgtcggactcctttcaccggtcttacttgaatggaacatgtcgaatactttctacatcttcgcaatttgttgtgtactgggtattatctttgttgccatgcgcgttcctgaaactaagggtgttccgcttgaagaagttgaacagtacttcagaaataagtatgataaataattcgattcgctgattgcgaaaagaaggaatctctggcagatggataatctgacagagatttttttatgcgaaaggagaacgtaccatgcaatcattactctttttcctattagccgcccttgccggcttgtttcagcccatccaaagtgggatcaactcccaattaaagtatgatttgaattcaacgtatttaagtggtactatcagtaactttatcggggccctcttaatggtggggttggcgttgacgttggaacgcaacggcttacagtccccaacgctaagtggtaaccatctgtggaactggacgggtgggatcctgagcgcgttgatcgtgtccgcgatgatcatcgtgccgaagaagatcagctattccacgttttttgcgctcttcattttcggtcaactgttcatgtccctcgtcatcgattactttggttggtttggctcggatcacgtaccgctcagccctagtcggatcatagggatgctcttgttactggccggagtggtcctcgttaaaaaatagttattcgaaacataaaaaagccgctccgtggatcttgccggagcggcttttttgccgaggcctttaaaaacaaattttacgaaatttgctgggagtcatcccggtctcagtactaaaaactttgttgaggtgtgacgtatcatgaaagccgcactgctcggcaatgtccgcgatactgaggtcgggggcggtcgttagcatccccttcacgtgcaagatccggaccgatgttaagtagccgtgaacgctgttatcggtgtaggcgcggaagttttgcgagagaagcgacgggctgacgccgatccgtttacagagcgcggcaatcgtgattttctgggcgtaatgtttatcgagataatccagcgcctgagtaaccatctggggcgtttgcttcagactggaccgatcggtgggggccgggtccgcaatcagggtcagcgcgatcagcagctggtagagtaatactgaaaaagtggtctctttatccgcgaaagcccgggttttaaacaggttaaaaatctgattgatcaggtgtttaagctcttcagtcgcttgaaaacaattcgttttcgcgttagtaacgtaatcgtataaggcttggacctgatcgccgttgaagtgaaagaagatgaatttgcagtcgctagtcgcgaagtagtggttccgctttttacaatccatgatgacgacggaatccttagtagccgtaaagtcccgccggtcatcaaaagtgaaggagagttcaccatcttcaattaggaaaacgataaatgagttcatgtattgacgatcgatcatgtaagggtagttaacgcagtattcgccggtccataacgggtagtagtaaagctgcttggccttattcgacgggttgttaaagtacaagccctgtaagcagcgcattccctgttcgttggtgggaatgtattctgaaaaatcatccatagtaacagcctccaagtaatgcatattaaatcacaacgatacgtatttttagcgtttaaccaaaaatctcgttcccactgtgatgacgcaaaatggttaaactgatatatacatatctaagcttaatattactacatattggcgaataatcactgatttaagccgatttatttaaatgttcgtttttacaatttttcaagatgattgtacattgaagcgtttacataatggcggtattctaattgtgaaatcaaaaacaaatacggttcaggagggtattattatgactttatcaattggtattatcggattaggcttcatgggctcagaccacgttaaacgggtcgcaactcgactcaacggcgcgcgcttaggcggggttgccgatctaaagaaggatctagcggaaaagtacgctaaggaatacggtgccaaggtctttgataacgggatggacctgatcgattcacccgacatcgacgccgtcatggttgtaacgcggccccacgaaactcatgaaaaattcgtgatccacgccattgaagttggcaaattcgtcttctgtgaaaagccattgaccttaacggctgctggctgtcaaaagattatcgatgccgaagttaagggtggcaagcgtttagttcaagttggtttcatgcgtcgttacgatcctggttacatcgaaatgaagaaagctattgatagtcatgaatacggcgaaccattattgatccacgccactcaccggaacacggccgttgatgaaagctacgatacctcaatgtcaatcattgaaacggcgattcacgaagccgacgttttgcactggttattaggcgaagattacgattctgggacgaccttcctgccaaagaagcagaccaagtacacccactccaaacttcacgatccacagatcattaccttggataccaagtccggtgtacacattgacctggaagtcttcgttaacgaccagattggttacgacatcaactgtagcgttgtttgtgaagacgggatcatcgatcttgaatcaccacaagttacttccgttaagacaaataagctgaaacgtcaaactaagattcccgttgattgtacggaacgtttcaaggttgcttacgaccatgaattacaaaactgggttaacgatgttgcacaaaacaaagttaccggtccatcatcatgggatggcttagttgccatggtcacctgtgacgccttggcaaagtctcgtgataacaacgcggaacgggttgccatcaagttaccagataacaaaccagcactttacaacgattaataacgaaaaaattggtaagaagggattttaatgaaattagcatacgatccatcaatgtttcgggataataccccgtttcacgaaatgattgaaaagacggcccggttgggatataagtacctcgaattgtcaccacgacaagactttatctggttctaccagtatccaaaagttaattccgcgatgatcaaggacgttaaaaagtggtgccgggatgctggtgttgaaatttcatcagtcttaccggttcagcaatggtcctcacccgacgaacaagagcgccaggccgccgttcggaacatgaaacggacgatcgagatcacgtcggaactcggcgtggacacgttaaatactgaattttccggtgataaatttaacccggttgcttctgaaggtcagtggtacaagtcgatggaagaactgatccctgaatttgaaaagaaccacatcaagttagagatccaagcgcatccaaacgactttattgaatcaagtaatgaagcggccaagctgatccgttcactggatcttgactgggtttcccaagtttggtgctccgcacacgccttttactccgatggtggcgtcggtgacgtgactaaggaaatcatggatagcaaggacgtgttgacccacattttgattgccgacacgttgaactacaagagtaacttcggcttgcgttacattattaacccgcctgaagcaccggtcaccatccatcaacacctgaatccgggtgaaggcgaagtcgactttgacgccatgtataaggctttaaaggccattcactttgacggtatcgtcaccaacaacgtttttgcttggccggataaggtcgactggtccaacgaacaaactttgccgggcattaaaaagggcctgggaattaactaatgaacgtttgattatctaaaggaggttattaccaatgatttcaattgaccgtttctgtcttaaccgtaaagctgccccggggatcgacctggcaacgaccattccagccgttgcgaagttgggacttaaaaatatcgaagtgcgtaacgacttatacggcgcaccggacaacgcgtcgatcttcgaccacatggctaacgctgatgttaaacaattactggacgaaaacgatgtccatctcgagacaatcaatgcgatcggcaacatggacaatcgtcaaatgatcgacgaaaacttagctagcttgactgaaatgctcgacatggctaagaaccttaatttacgcaagatcatcttttgtccggttcgctcgaccgatgatcatcaaagcgctgagcagcgacaggcagacgccgtggcgaacgttaaggactactcgaaagttctgaaacagtatggggttgatgggttgatcgaacccctcggctttaccgatagtaccctaagaacgccatgggaaggtcaggcagtcattgataaggccggtgtcgataactttaagttggttgccgacacgttccactactacttagcaaacgtgacggaccaacaattccacgaccaagttgatatcaattacattggtttggttcacttgagtgccgtcacgggcgacaagccacgtgaggaattggatgatcaggatcgttacatgttgacggaagccgacgtgatgaagtcggcagattgggcgaagaagtatgaagcggccggctaccaaggcttgtacgcttttgaaccattctcggatgatctgaaacagtgggaccgcgcgaaggttgaacaggaactgctgaagagtattcaacttgtccgtgaataattaattaacggcctcttgaaggtaattataaaatgttgaagtggtgcgcatgcgcttgaccaggttaattggtcaagcgctgcgcaccacttttttgatgtcacttataggcttactaagccggatctaacggatgtgagaagcagaataagctgattggtgatgtccggtactattgttgatggggggcttaagagtagtgacctagctgggagttcaaccgtccagctaggggtaagtggggcggctatcaagcggttcagtggtgtcttttggcgttctccaggctgacccaaaggctgagcttaaagctgcatctgccatggttaagccgcttttgggtcagccggtaaagcgaaagtcttccgtggtccgggcttaaccaatcgtaggaaagcgaggtcggtcagtatcggtggacgtgcagttcattttttaattacttgtttagagaccgaggccccgtttaatcgtcggtaaagtttgttcgttggaccaatcgaccttgtcgggccaagcaaagacgttgttggtgacgatgccgtcaaaatgaatgtctttgagcgcttggtacatggcgtcaaagtcgacttcaccttcacccggattcaggtgttgatggatggtgaccggtgcggccggtgggttgataatgtaacgtaagccgaagttgctcttatagttcagagtatcggcaattaggatgtgacttaaaacgtcttggctatcaagaatctgtttgcggacgtcaccgacacctccatcggagtagaaggcgtgcgcggagcaccagacctgggagacccagtcgaggtcgagggaccgaattagtttagctgcttcgttactggattcaatgaagtcgttcgggtgtgcttggatctctaatttgatgtgatttctttcaaattcggggatcagttctgccatcgacttgtaccactgaccttcagaagcaaccgggttggctttatcgccggaaaattcagtgtttaacgtgtccacgccgagttccgacgtgatctcgatcgtccgtttcatgttccgaacggcggcctgacgctcttgctcgtcgggcgaagaccattgttgaaccggtaaaactgaggatagttcgactccggcgtcactgagccagcgtttaacgtttttgatcattcccgagttgactttcgggtattgatagaaccagataaagtcttggcggggcgacagttcgatgtaatgatagccgaggcgggccgtcttttcaatcatgtcgtgaaaggacgtattgtcccgaaacattgatggatcgtatgctaatttcaattcgattcctccactctctaatttaatttgccgtggtcgagagcgtaaaatatcttgtgtaaatgcataaaagatattttacgctctctttattcatggcggttatgttaccttaacaatcatgttgggtattctttatattatgtggctttggtactttggaaataaacgaagagaacattatgaaaaagaaagcgagtatgtttcacttcttgactatcgtgatcaactctctaaattaagcgcagacaatacaatacctttgttcacgactaacttagtgtatatgactaagattaagggtgattaccaaattaagcgtagtaccatgtattctattctcgacagacaacctaaaagagctaaagtttattggtttgttacagtcaatgaaaccaatgcaccttatgaaagtaattatacagttgatttacttgagacgcataatgttgttaacgttcaattgtacttagggtttaagaaatctcaatccgttagtgtctatttacatcaaattgtaaatcatctagtggaacaaggtattttagaaccacaaatacccacgtattcaacagagcgacaacggaaagtcggcgactttaagtttgttattataaaggaacaaccagcagatttaattgccaatgataagttaagctcgttagatagaagattgattggcgggcgcatctatttgcagaaaattacggcctcacctatttcatggtatggtttggagtttagcaatgtcatagaagaaagttctccgttatttattactcaagatcaggatcaatacttaatccaaaagaaaatttatcatcgaggcagattaagtaagactgaaaaatgagtatgcagtagtttaagtgcaacaactaagttagaaaaattatatttagttttaggtagattgtaaaattaaccttcaatgcatattaataatatttctaacgttcataatgagtttgaatcaatttattataataagaattataaatagtttatcgacagattttagagtttctattaacccgagccaatcaacgatgctgctaagccggttcaggctggtcaaacagaggctactaattttgtaggtcaatggttgcctcgaactgatgaaactgaccaacgacatatgacactgaggggcttattactattagccatgagtagtttgttataactcttcggaatgactaagcggcagtacaaagaataggatgatattatatggtaaatcatcagcaaactaagaaccagtttgagagcttaacaaccctggaagctattcagaaacaggcataccagatgttagtgcaaggactggccaaaactgaattttcaatgcgtgagtggggaatattagtctatcttgaacgacatgggcaagctactgctagtgaattagctgatgcattcacggtcacgcgcacactaatttccaggaatacttggcgattgattcaagataatttaattcaatcacaagtgaatccaaatgatcgacgagttgtttggctatctttgactgttaatggccaagaaagggtccaggaaggtgttcggcaagtgcaagcgaacttaaaaactttcaaccagagtcacgatttggagaagttgactaaatatgtggaagctttgtcacaacaacttgctaggatcaattaaagttttttcaagataagtcaagatgtactaatgtaaataaagatcagtctgttaaaatcttggggttttggcagaccggtcttttgttgaagtgaagaaaatttaaacattaagattatttgttttaaaaatcaaaggcgtaaacaaatgggacgagaaaccaaaattcggtttctcgtcccatttacttatacagaggctagttatgtcacagcctctttgtttattatggtattatgtcgtttcgtctttgtggatttttcttattatttcgaatgcttctttttttgaagagtgttatagagttgttcatttgtattgttgacaattaaatagatttttaatgtactgagtagcttatgttctttgtaaattattccattaattttatgagtttgtgttgttttaatgatgcgggaacatcaatgatacgttggttggaactacctctaaagggatggtcaccagctttaagacgttcatcgaaacgaccatcaactaaaacgtcaagttttgataacatttcaagtttgtcgtctgaatcttttaatagttcttcccacgtgtagcctgaccatgaccaaatatctttggtcggtaattctttgcgtacacgatcaattaacggaattaaaatatttgtgtttaaaaatggttcaccaccgagtagggtgagtccctgaacatatgaatgtgatagatcttggataattttgtcttgaacgtcttttgtgaatggtttgccgttgttgaagttccaaattgatgcattgaaacagttatggcagtggaacatacacccagagacaaataatgagcctctaacaccgtttccgtctgagaccgatggaaacttccagtcagcataaagtcctttggataagtctttagctaaccattctttgggctcagggttagcaaattgtttaattttggtaggttttggatttttgatatgaatgtttggagttgtcatgtaatcatccttttttttaatattttgaaactgtgaaaagaccatcacgcaacgaacgtgaatcgatcctctcatggtctttattttgattaattgtttagtttgcgaactttgtttttatcggcaatgtcggactccagaaattcgccgttatctaagcggccaagggtcccagacatatgcttgacacgatgaatgatttcggcttgacgaccgtgttttggcggacgtttcattggattgccaagataaccgcagatccggcgggtaacgtcactggtttcagaatttgaatttccacagtttgggcaatggtagcctttttcatcggctgtgtattcgccatggaagtcgcattccagacagtggtcaattgcggtgttgatttcaaaataaccaatgccggctttataggaataatcccaaattgcttcgagcgcatctaagttatctttcatacatggtaattcaacgtaactgataaaaccaccgtttgaaagtttttggaagggtgcttcaaaatctagtttttcgaacggtgttggttttcgttcaacaaaatagtgaaaactattagtatagaaatcatgatcggtaacaaatggtacgtttggatatagtttatggtcaatttcttcaaaggtactgttcagactttcggctggagtaccataaactgaaaaaccgtatccatattgttttttccatgccgcagctttttcgttcatgtgtttaatgacggaatatgcaaagtcgtgcgcttcttgattgtaagtgtgatcatgttgccagtcaccatagaagcgagcggtcatttcgtataaaccaacgtatcccattgaaacggatgcacggttgtgattaaacagttcgtcgacatttccatcaggatctaaacgaccatatccgccatacatgaatccggctggattgtatttcggtaaggcttgtttaacattttcaattcgaaaaagtaaagcatcacgttgtagatttagacgttcatcgagtaatttccagaatttttctttgtcaccgtttgaatcaagtgcaattcttggtaggtttaaactaacgacacctaggtttaagcgtccgcttgagtaatcatgtgtttcgccacgagcttttaaatcttctggtgacatcgcgctaagaaaactgcggcagcccattgaggctttaaaactgccagtaatatcgatgacattgtcatagtttagaatttcgggtgacatgcgtttaataactgattttaaagcgagtttcttgatgtcataattgggatcttttggatgcatgttaacgccgggtttaattgtaaataataactttggaaaaattgcagtccgatgatctttacctagtccagcaatgcgttggtgaaggataccgatttgaatttcacgttcaaaccaactagtaccaagtccaaaccctagcgtcacaaaaggagtttgtccatttgatgaatagagtgtatttatctcgtattcgaaactttgcatagcttgttgaatttcgcggcgtgtcattatttctgcgtagttcttttgatcttcgatgtttaatgatttagcaatttttaagtgctttttaaatgattttttagcgtatggtgcgaggacttcgtcaatgcgatcgtaggagcaaccaccatattgagatgaacttatcgctgaaagtatctgtgatgcttgtgctaccgcggttgtcaatgtgtggggcgattcaacatcagcgtttcctaatgtgaatccattcttcaacatgtcttctaagtcgattaatccacaattgtgatattggtttgcaggactataatctaaatcatgccagtgaatcaaacctttgatattagcatcggcaattttttttggcaatatttttaagccgattgcttttgaaacggcaccagcggtcaaatcacgtttggtggcataaacatcagcgtctttgttagcattttcgttaacaacgtcatcatcttttttcaatagcttgttaatttggtaatcaacagatgtttgttttttacgatcgatgtcgtgttgtaaacgatatgctgtatacgcttcggcaactttaaattcttcaacatcaacaagtgattgttcaacggcggattgaatctcagtaatgtcaaattgcattttattttgtcgtaacaatttgttaattgttaaatcaacaatttgatcaatcttggtgatgtggtcttcgatgtttgaatacacatcttcaaatgcttttgtgacagcgtttgtaatgttttcacggtggaatttagcaatggatttgttgcgcttgattacggttttttgggtattataacgttgtgctaagcgttgtttttcttcgagataatgcttataaacgaagacactttcgtcgtcatattcccacatctttgaatgatttttgtgatagcgaacaatttttttatcattggcaagtcgtgtgatttgcatttctgacaatgatagttcgttaacaacatcttttagttgcatgtagtcagacctttctgagtttttattttaagtctaacgataatgttagacttacagttttattatagcatagctcgcatttatacaataacatttgttgatgacagaaatgtttaactgaatcgcgttttgcttttgttaatcggggttaagagaaatcacagatgaaaatgtcatcggcatagtctttagtgaactactcgtcactaaagtaacgagcttctaggaacaccgctgacttacacgtatattctaggaatatcagtgcagaggttacggctatttactaagggtcgttccgacccagtttagtcttttattaaacgtttaatatattgatagcagcattaatgtctctatcgtgattaataccacagttaggacatatccactgtctaatatctaaggtatgtttaccatcatcgtacccacagcttgagcagatttgagatgtctttcttggattaacagtgaccaactgtttacggttctggtgcaaaatttttcaggtaaacttattttgagtataattagcctaaaaagcgaggtagcgatgatggaaaattattttaaagggcgacatttccaaaaagatattattttggtagccgttggctactattttagattctcattaagctaccgtgatgtggttgaaattttgcgtgaccgtggaattattattcatcatacaaccgtcatgcgctgggttcaccattacgggccactattcaaattattatggcgaaaacagcgagatactcatagtcaaagctggcgagttgatgaaacctatattaaaatcaaagctcgttggcattacttctatcgagccattgatagtcatggattaacactagattttgagttacgtaaacatcgtgattatcaatccgcctatcattttttgaaacgtttattgacgacctatggtcgtcctgattgtctggttactgatcaatatgctggcactttaaaggctattaaacaagtaattaaagatggcttattggtgaaagcaaatcaccaatgttctaaatatcgtaataatttgattgaacaagatcatcggttaattaaacacgtcttagtaaaatcaagcggttttcaatcactacgaactgcgctaaaaacgctaagtgggattgaagtcatgcatcaactacataaagtaagccaaagagaaccaagtctctttggtttttcgtcgtcacaatcactaatcgaattattagtacaatgatccgttcaacaatcgtcccaatgtattaaaaagactattttgttaattttgcaccagaaccaaactaacttcgtgaagccaagtggctgattgattaacgacgacacgcttaatttatctggcgttcaattcgcaagcgtcatctggcacgctttgatgcgtcattgacccaactaaactcataaaacttgattaaaaaattgtcgatttgaaatctcattatttcaaattgattttttattgtcttttttggccaccaccgtaatttaatcatccccggtaccagccgtttaatcgtcattatcaaatgataatgttaattcatattttagcaattcaatagattcattttgggaaagtcggtattcaaacgctatatattgtgctacgataattcacgtcacactatatatagacaaaggacgatgattcgctacggaacctgtaaatattctctacatcagtttgagcggtaataccaaatattttattggcaaactgacaaaatactttgaagaagaacgccacattcaagttaattcaattaacgttaaagaacaccccgaattcaccactctcgaccaaccgtttgttgccttcctgccggcctttcttaaaggcggtaacggagttaacaacggctacaccgaaatcttgaccaccattttgggggattacctagaacacgaagataattatcgccgttgttacgggattatcggtagcggcaatcgtaattttaataagcagtttgcactcacggctaaacagtacgctgagcgcttcggttttccctacattaccgattttgaactacgtggcacagcacacgattttcctcgcatcgccgatgcaatcttaacctatcgcgatcaattcagttctcaaacaacaaaggagtagtccctaatggcaactagcaccccagaaatggaaaacacctatttttacttaaataacctcgtaaacatccccgtcgacggagaaattccgctatattacgatcaagaagccctcaaggcctattttgaagagacggtcgaaccaaagactaaacaatttgattcattggatgccaaattaaactacttagtcaacgaagattacattgatccagatatcctgaatcagtattcccacgaatttgtgcggtccttgttcgaccgaatgaaagaccatcacttccatttccgcagttttctcggcgcgtacaagttttacacacagtacgccatgaaaaccaacgacggacaacaattcttggaaagctttatcgaccgtgtcgtcttcaatgccctctaccttgcaaacggtgatgagcaacttgctaatgacgttgccgatgaattaatttcacagcgttatcagcccgccactcccactttcctcaacgcggggaaaaagcgccgcggagaaatggtgtcgtgtttcctaattgatatggccgactcaatgctctccattggccgtggcgttaattccgcccttcaactatcacggattggcggtggcgtcggtgttaacctgtcaaatctccgtgcctcaggcgattctatcaaaaaaattgccaacgcctcgtccggggttgtaccagtgatgaagttacttgaggactcatttagttacagtaaccagcttggtcaacgtaacggtgctggggttgtctatctcaacgttttccatcccgatattttacattttctggataccaaaaaagaaaacgcggatgaaaaaattcgggtaaagaccctgtccctcgggctgatcgttcccgataaatactatgaattgctcaagactaacgaaccgatgtatctttttagtccctatgacgttgaacgcgaataccacacgccatttgcctacattgatatcacgaaggaatatgacaacatggttgccaacccgaacatcaaaaaatcggtctttaacgcccggaagctagaacaaaagatttctcaactccaacaagaatctgggtatccttacatcttgaacattgatacggcgaaccgcacgaaccccgtcgatggcaaaattattatgagtaatctctgtagtgaaattcttcagccccaggaaccctcagaacttgatgatgatctatcgtataagaccattggtaccgatatttcatgtaacctcggatcaactaatattatgaatatgattgattcgccagactttggtcgctcggttgcggtcgccgttcgcgcgctcaccctcgtgaccgatacaaccaacgtcaaggaagtcccaaccgttaaacatggtaacgaactttaccatacgatcggattgggtgccatgggtctgcataccgcccttgcacgccaccaaattgaatatggctcacctgaagcccttgaatttacggatgcttacttcctagccttaaactactattcactcgtcacgagtaaccaaattgcacgcgaacgtcacgaaaccttcgccaaatttgagcaatcaaaatacgccgacggtagttactttgatcaatacctgaacgccgactttgaatttaagagtactaaagttgcagaagttttcaaaaacattaaattaccatctgttgccgactgggaggccctcaaacaggccgtcatggcggatggtctttaccatcgtaaccgacttgccgtggcaccgaatggttccatttcgtacgtcaatgaaacaagtgcgtcacttcacccaatcacacaattagtagaacaacggcaggaaaataaagtgggatcaatcttctacccagcaccctacctgtctaacgaaactttgccctactacacgcccgcatatgatatcgaccaacgcaaaatcatcgatacctatgccgtagcgcaaaaacacattgatcaaggcatgagtctgacactgttcatgcgttcagttttgaaacccgacctttacgagtggaaggacaatgacaacttgaagatgacgacccgggaccttaaccggttacggaattacgcctggaccaagggcatcaagtcactttattacatccgaacattcacagaagacgacgaaatcaaaaccgcaaatgaatgcgagtcatgcatgatctagggaatgtattcagggttagcgcccgtttaacccaccgacaacacgttattggatcacggtgcccgtacacctgtgaatcctaactaaggagacgaacaaataacgatggactatttatactacaaagcaattaactgggatgacattaaagataatttcgataaatacacgtgggaacaactcaccactaacttttggttggacattcggattcccgtcacgaatgatcaaccagcttggcaacagctagcagacactcaacaacaggccattacccgcatgttggcaggtgcatcgatgttagccgtctaccaatcagaggtcggcactcctgccattcgccatgatcggcgaacccaacaagaagaatccgtattaaatactattaccttcatgaaatcagtccatgctaagagttacacgaccattttccgggccctgattccaggcaatggtggcgcaaatttcacttgggcagacaataataccgatctgcaagctgaaatagaccaactcgctcaaacgagcactaatggcacggctttacaaaaaaaagcccttttcattttgaccgaaactggcctttcatttggtaaatattggccaacccttcaaacccattctctcgtcaatacctaccaaatgttggccaatattcttcgtggaagtgccatctttagtgcctatgtcggctacaaatttcaccttgggtttgaagacctcgcgtcaagtgaccaagccgaactgcagcattggattaacacccagtttgatcaactcatgcaaaccgaaaaagatttcctagaagctaaccttgaagatgccaccgaagccatcaatttggcctactatggtgccaatcatgcactaacatcacttggtttcgatgctagctacgaggttcagccatctccactagtggcgcagctcaagaaattgatgatcgaccaagatcaattcttgcaacaggtgacggcagcaaacaacgaatcggacactgaagaaatgaccgacgacgactacgatttctaaggagcattcaactaatgagctataaaacaattaactgggacatcatcgaagacgaatttgacgaatatgtatgggataaagcaacggcacaatactggttagatacacgggtgcccgtttctaatgatttacgcgactggcggacactttctgacaccgaaaagtcagtcatcaaccgagttgtcgggggattagccttgctggacacactccaatccgaagaaggcgtcgacgtcatgcggcccgacgttcggacacggaaggaagcggcagtcatcaatgactttttgatgatggagtcaattcatgccaagagttacggcactattttgacctctttgaacgatcaggccactgttgacgaagtcttcaattggatgaacaataatccccgaatgcagtacaaagccaaacggatcaatgacatttaccaaacaggaaacaaccttgaaaagaaggtcgcaagtgtctttctcgaaggaattttgtactacaccaacttctttaccccactttggtaccgcggtaacaataagctctccaacctttccgaggtcatcaagctggtgatccgcgacgaatccgtccatggcacctacctcggctacaagttccaactaggctataacgagctgccagaagctgaacaaaaaacattcaaaaaatggatggatgatttactcgatgatctcctcgaaaacgaatttgcattcactgaagaagtttacgcgccaattggtttagccgaagacgtgaaacaatttgttcactacaacgccaacaaagcccttcaaaacatgggctttgaatcccgcttcccccatgccgaaattgaagatatcaacccgattgtgatgaacggcatttcaaccgaaacggcgaaccacgatttcttctcccaagttggtgctggctatctaatgggtaatgccgaagccatggataacagcgactacgatttctaattcttatccgctttctaatcaaaacgtccctccccgaatcaaatcgaggaaggacgttttttaatttgtagttgtttgaatcggtgctagcaaaaagtgaatctgttggcgaacccgttcccgcacatcggcactcaatcgccgctgatttttaatcaacaattcatcatacagtaccttctgaaaaatcgacatcacaatcatcgcaaggttatcggcagcttggctgtcattaagcgccagtttctcgatattttgaaaggcttgagataatcgcgcctgaatttgttgaatcgcgtcaatcaaccagtgagattgctcatcagacaacagcattcgttcacgaattgtaataatgaacgattgatagctggtttcactttggaatgcttgccatagctgatcgaataatgtcatcatttgagtttcgataccagtgacagttgtcgaatttgttagtgataccgttagtaaactaacccgactttcaattccctgctgaacaattgtatccaaaatttcctgtttaccatgtggaaagtggtagtaaagtgcgccctccgaagtccctgccgctttattaatcattcgtgtcgtcgttgcctcaaaaccgcgactagcaaacagtttgcgagccacatcaataattttatcctttggttggtcgtttttaatcatttaatctccatcttcgtaaaaagtcgggcactcaggcccgacttaaactacataataccgacagtttgtaaaataaggtacccgtttaagattaccaaaacaattgctgaaccccaagcacagtacttaatccagcccctaacgaaaacgaacaaggaacaaacagatataaccattggggggaagatgactataaagagttcttgacacatgtaagcaatgacttaatggaaaaggtccaggaaaaacaagatgctcttaattgataatattagctgatcaattcaatattgacctagactttttttatttcgtgatgtaacgagacttgtagatgtccactaggagtctccaaattagaccctgtaacagagaataataggagaatgacagcgacacaacttacagttgtggcctcttttttgatactgtataattaaagggttagaaccgtgtcattacttaatgacataagtaaggagataaaaagatgaaatatggctatgcgcgggtcagtaccactgatcaaaaattagcaaatcaaattgagttactaaaattggcaggggcagaaaaaatctttcaagaaaagtttaccggcacaactactgaacgaccggagtttcaaaaattgttgcgcgttctaaaaacaggcgatactttgattgtcactaagttggatcggtttgcacggaacacgcgcgaggcattagccattatccaagagttgtttaaagaaaatgtcaaagttaatattttgaacatgggcttaattgataatacgccgactggccaattagtctttacaatatttagcgcctttgcgcagtttgaacgcgatatgattgtcacgcgcacacaagaaggtaaattgtatgccaagcaacatgatccgttgtttcgggaaggacgaccgaaaacgtattctgatgaacagatcagatttgcttatgagctgcgaaaacaaggcatgacttataagatgattgaacgaaagacggggattagtaaacgcacgcagcagcgtcggtttaagttaattgaaaaagatagcttctaaatttatttaagatggcttaaattagcctaaacatgaatacttaaataatcgcttactaaaaagattactgcttggtttaagtagtcttgagaaatattcattttgaaattggaggcattaaattatactagctttctatataatattagttgtgatagggttcgatatgaactacaagaggcccgctcaattgttagttgagcaggccctttgtgggtattttgataaagagttagtcactctatgctaattataagtcttagtttccaaatagaaacatatttatcaaaataatacagtttatacgatggatgttagtctctacaatgtgtttcatagcagttgatagttacggttaaaaaccgtatgcaacaattaataagaaatgcaaattttactagggactgtctgaaaactaaaaattcaggtataatctgaggaaaaacgaatcgaggcattccgatgacaacacctaaacgatacgaactggaagatgctcagtgggaccgaatcaaaggatacttcccgccataccggactggccgtccatcaagcctagacaaccgtaccgccctcaacgctatcctctggctcatgcgcagtggggagccttggcgtgatctacctgaacgctatggctcttggaaaacggtgtatagtcgcttccgagcttgggtaagttcgggcttattcgaacaggttttcctcgaattgattgacgaccctgatagggaaaacttgagcttggattcaacgatcgttcgagcacatcaaaaagccactggggcaaaaaaaacgccgaatgtttggtcgaaaatcaagctattggactaagccgaggtggccgaacaaccaagattcacgcactcgttgacggattagggaatcctctggggtttcgcctaacgggtggccaagtacatgatagccaagttgccagcgagttactggaaagcttcgatatttctcaatcaaatattattgcggataaagcctatggtaccgcgaaacttcgccagtatattgaagataaagcaggcgtctataccattccgcctaaggaaaataccaaagacaagtgggcctgtgattaccacgtttattgtgagcgccatttgattgagaacttcttcaatcagttgaagaactttcgtaggattgcaacgtgttatgataagcttgctcacgtttatctggctacggtctacattgcctcaatttgcatcttacttaagtagttttcagacggaccctagtcagaataacaagtcaatctacagtacaatctatccaggcaaccggctacaaattaattaactatatgcttaacatttcggcaaaagggtgttataacataggcttttagaggtcgtatgagatctcaactaaactaacaagcgtctcattgccgttggcgtgtcaacggtccgtgctagaacaagaaactatttaggttaattattaaataatagctgctggcaaaagaagccccacagcaaccttaattggctggtgtggggcttcttttgttattctaaatcgttttcagtaattaattgattcaggtagattgtaaaattaatcctaacaaagttcgaaccaaaaaagatcagtgtcccttaaaataacgtttaccataaacccatttttaaggagttgattttttgtctagcataaccacctatttggataatttggcaaagaattcggattaaatttgcaatctatcatttaactttgaaatattggacaaaatagattaaagggaataaaattaacacgaacgtatgttctttggtggcagacgtgtcactaaaaatataaaaggggattttaaaatggcagatgaagccgtattaaaggttcaaaaatggttaaattcaacatatggtaatgtcgaagggtttaaaaaggcaccagaaaatggacagactggctgggcaactatttatagtttgcgtgaaggattgcaatacgaattaaaagtttcgccacttggtgaggggtttggtaatgccacccggaaggcggtagatggcttcgttgaaaatttgaagcttaattataaaggtaatgttgccaagctaattcaaggagccttttggtgcaaaggaatttcaccaaatgatttttcaactgtttattcggctgatacgatagcagcagttaagaaattacaaagtgatgctggtattactgccaatggtacaatgacaactaacttgatggctgcattatttgatatgagtgcttttgtattagtccaaaatggagatgctaaaattcgggcaatgcagcaatggttaaatgccaattatgagagttatattggtattagaccttgtgatggaatctatcagcgcgacacaaatgaggcactaatctatgctctccaggctatcgaaggtatgtcacccagtgaggccaatggttattacggtaatcaaactattgctttgacgcccactgtcaaggtcggcgagcatggtaatatcgttaaactaattcagtatgggctttatgtgaataactactatcagtctggagcctttgatgggtatttcagcactactgttgcaaatgagattgtggcttttaggaagtttatgattttacccgatggctcattaagtagtgcctcgacttattcaggcgtagctgatttgcgagtgattaaaggacttctaactagtaatggtgataccggtcgagattctaatacctttgattgcgcaacccaactgacagatactagtatgattcaacggctgtaccaagctggtttttcaatcgttggccgttacttaacgggatctgtcggaacgggtagtgccaaaaaagccaagaacttgacatctgatgaaattagtaaattaactgctgcgggtttttcgatttttcctatctatgaggacggtgggtatgaagttagttatttcactgaatcacaaggaactaaagacgcatacctagcagcatatgcggctcgtgcgctcggctttccagacggtaccgtgatctactttgcagcggacttagatttacaggatggagacatcgagggtacggttattgcgtacttgcaagccgtacgagcatcactaactgacttaggctataaaactgggttatatgggacacggaatgtttgcctacatgcggcagaaagtatgggaatttcgaatttctttgtggctaatatgtcttatggatggagcggtaacctcgggtttccaatgcccaagaattggtgcttcgatcaatttgtagagtatactactggttctggtgttgacattgaccaagatgcatcatctggtcgtgatagtgggactaaaaaatttaaaagtacaggtggtgtcaccgctgatgaagcgcttaaatatattttagggaatacgaacctgcaaattggtgggaaatacgttcaaactattgggccgtttaaggttacctggcttgctactaatgaagtagctgataaatcaagttcaaacattgtgactatttcaaataacgaattaccggaagctgatctaacagctattctagaaacaaagtataaacttccagattggattgggcatttaactgttgatggtattggaaaatgggggatttcagagaaaataaagaaaggaaattttgagttagaaattggtgatagtaaggacggtgagtttagttttaagttgaaatattatgtctatcaagttgaaaaaggcccattaagcgagaccttaacaattgaaattgatgttactttcaacaagagcgacttcgataactggcctacctacgaccctgctgaatcatttgggataacattagccgctaccctttcagtagctgtaattatttcaatggcgcctgcaattgctggttcagcgtctgctgcgggtgttgtcgcagcatttgtagcacttgccacaaaatttttaacgaataataaaggataagataaaaaatttagataaaaaagaacaaggtgagaaaccaaaattagtttctcaccttgttctttgagcactcagattcctgtaccaaaccatcctataaccaacgatagtaacaataaagagtaagattgtaaatggtacttaaataaggctttgtgatcttgttcgtttggtagtaggaaagcttgtttttcaataggctgctcatgccaaataggttgttgtttccaaaaatgatatagctgttggggaagtgctatcgtgggtggaatagcaatcataaagccaatgattgctggtcggatttggatgatactatttccgaaagcaactatgtaccagagccacatgagcgaaccataaaagcaacctctagcaactgtaaactctagccagaagagtagttcgttttttagggagcttctacgatacgtttgaaggacttttttcttgatctgtttcatcttttgacgggaatcgcttttttttagaaagaggccccaaaaatataactcgtctgatcttgtatagtccataattttttttcgaatcttaccaagaaatatgagtaaaacaaactcaactaataagatcaataatggtaacatcaattttgggcctccttaaaaaggtacacttatccagtcgctggtagttacttatcgtgaatgttagagttatactattgctgattttaacaaccgaaattttaatagttaattcagttggcgccaacgtggtatttattaatttgggccacaatagccgactacatctataaatgacatggtatcatactatttatagatgtaggttgctaatgaatcttttaatcgatggttatgttggtttttctcaaacagtccaactttaaccatgtaacaattaatgagatcatagcagcacttgaacctattaatcaacggccattgaaaactatcggacttattcggattaattttacaatctgcctagaatctattttttgttatagaaagtgttatatttttttgacactaggaaatgtgcaaaactatagacttacagatggattataatcaactttttggggccactttacatggaagatcgttttattttaattgtccgaaaaaatagaattatttggttaagtctaaagaggcacttcataatcgaggtgcccctttttagacttagctagtaatccgtaccgaattaagttaatggcttacgatctgtcaacaaagcaatcggcgacagaatcaatacaatcaccgcgcctactaagtaggtatgactgaaggcctggctgatttgtcgattcttactatgcttaatttttctcaaagctgtcgttaaagcttctttttgtgccaattgtttgagacctactaacaattttttctgaccctgacttattttctgattacccaaattaattttttgagaagctactgacagtttagatatagcggtattttgattttctaacttggttaaggtaagtgctagttgctggttacccgcttttaagttgtcagtagctagtgctaacttcttctgggcttggtagacctggtgaagatcggttcccttttggggctgtggtaaatcaacttgagatttggccgcttgtttaagggcacgtattaggttcgtctgtttgtttttagttgttaatttggctgatccagtagtggaaaataggctattcaattgttgatgagccactttgtttacaatctaccatataaacgcattctcgtgcattgtttgcttatacgtgtatatagttgtcaaatacgtgctatgattgtgtatgtcctaaatggacacaagcaacgctcctaagcaaagcctgtatgtactgatttcagaaaagccctctattccgcataatagaggacttttttgtgtgcattctgcttaatttaaacggacaagtatacatctaaaagctgaacgtgttgtctgagagcgcgatattattttcccctagttcgggcgtctctactctccagaatatctaattgaaaagtaaattttcgcttgtcttcagcgtctaaagaatcaatgagatagtctaatgcgttatcaatggcatctttttgagatttatatagaccaattccagataaagcttccgctttgttcttaatatggttgttgattctaacgttagcataaaaagtaacagaatctgcaacgctttttcccagttttgatggtttgccattattacttttaagatcatctgtagtaaaggtgtttttgggtttgatatcttgtccacgatcaagtgggtccgtctttggttgtttttttagattgggattgtttaataatccgctcattcctattcaccagccattctgctaaatatttcatcagtaacgttggagtatacgtcttgaactgctttatcaaattgatctttaaatgtcaccccggttacatcatatcgttttaagcgttccatatttttaattgttatgtcaaaaatattttctttaccaaatatatcaattgctttagctaaggtgctcttatcgacaggggcaccatttttcagcaaaaccggcaatattcctagtaaatctaatgtcggagcgtggaattcattgataatttgatcttgcatgtatttgatgaatgcctgggcaccctgaagcgatctttcctgagtttgaagaacgacaatcgcgtagtctgtcatatataatgcggtatctgtgattaggctaattgtaggtggaacgtctaccaacaagtagtcatagtcatctttccacggatttattaaggtagacaagtattttacacgatcggtgtagtcagaaattatattctccatatatctaggatataaagaaaagtcagctgaggatggaagaatatctaaattttggattacgttgatgatagctggtttgaggtttttgtttttaattgcggtcatcaaggtttcatcaaaagaagttacttcaccgccgaagttatttttagtttttaaatataaattagtggcgttagcttgaggatccaaatctattaatagtgttttatacccacgacgtgccaactcgataccagtcattgtactattagttgtcttgccagtcccgcctttaaagtttgaaaatgttatgactttgctatccaaaatatcacctcataaatatgtagtgtaatgctcttaaagcatagcacaaaaattagtacatgtatacaaatacaagtgtgtaaaaataaaaatgtatacatgagctttatgtagactgcaatagaggcgttttgaatgagtataaaaatactaatttttacattagtatttgtactaatgtaaaaatgtatacattttaaaaaaagtgttgatttcttttattgagagaaatacaattgtacttgtaagtgaatacaaaaaaacacccaccgacgggaatcggtgagcgccacataaaagtcatcgttgtttaatgactattatatcatggccggtgcgatttttaaagccctaggggacaagctggggtctaaatccaaggggacacgtttgccagtgcgacttcaataagtctggctataccacaacaaggtcatctgtacggctgggtggtgaatggtgagcgcgaccattaacggcgcgggtggtaaaacgaagcttcggcttggtgccactgattagttggcgatcgaacaaaaataaatacgtattgccaacgcctactagggcgttttttagtaggttaaaccgaaaacgtaggtttataatgagtggtggtagcaataccgcaattgtacagacaagcgacgggcgttaacgaccgacgaactaaggggaaacttttagtagtagaattgtactctggttcagttattccaaatagctgattccagggaacaattctgcgctcaaaacgtcactccctctaaactgaatggaaaaccgtagaccgtcaagtcaaattccaaagaaaaaaagaaagttggtggaattgttggaatgtaaggattacattgttccattgaatccagatgtgatcgttaagaagacaatctatcggagttctgcaagaattactgatcgacaaaggaaccaagtgaagagagttttgcgtagtcaagggtatcagggaagaattagtagtattcgatacactcgggtaaattacaagtattcctttaaagtatccgtgaagtatcaggggagtgtcggtaagtttttggttaatacaaagaatgagacagttgaattcaagggaatggcctagacgtaatttcagtgaatttcacaaagtatatttaccgataaatcagggattgaatagctagaccaattgtttaccagaaattttcacaaaggtaaaataacggatcgttgttttatcagggagtgagggggttacttgggataagccccattatgttaacctctaaacctgtttctataatattttattttttcgatcatttttgactgcatatgatcgttacaggaaatcgaaaatgaaagttgttttcacaataacataatattatattagtacttggtacggtttattaatttttttgattgcaattacgggtagcgtcaagaatcttgtgtaaatggtagattgtaatatattcgggcataaagagtcttctcaactgatgaggaggctcttttttgttttgtttaactgcggcaatacattgatctatcggcataatattttggttagtgattatttcgatatataatgcaattagttatattatttgaacgaaggtgctgccaatggattactggttatatcaactggaatgggtgctgcggctgtttgtggctgctatttgcggtggtgcagtcggttatgagcgcaaagtccgcttgaaaactgccggcattcggacccacatgttggttgcggtcggtgccgccctcttcatgatcatttcaaaatatggtttctttgatttaaccagtcacaccactgacattagcttggacccatcccgggtagcttcccaggttgtcactggaattggattcatcggtgccggggcaatcatgaccataaaccacaagattgacggtttgaccacggcggccggcttgtgggcaacggcggcaattggtttggctatcggggctgatatgtatgtcatcggcattgccggtacgctgtgcattctgatcacccaaacgattgtccgccgaatcaaggcgctaaaacgctacccgaaccgcaccatgatccgcctgcaagtgaccttcactggaaaattaaacgatatggacgccctgccgaagagattgcaaattatcggcagcagcaatgtccgcatgcgaatcttggcgtataagccggattcgttctcactagaaatgcaaatcaggttaataagacgaaccgatcccgatgatttcatcatgaagatgagtaatttagcggatgtgaagaagattgatgtgctggattgaggtcagggtcgtcagagcgcatttccactatataatggcgtacaaagccaaagtatcttagagacccgtcaaagatttctaccgtagtggcgtcctatacacactatctataagaagctgtccaagatctatgatttttgatatacttctacctatctgtccaagctcgatgtgaaagcaaccgatgtctatttacgcggcgaatttggtcgaaaaagctctcaaacctttgctacgagcggaagttcaaaaaatggacttaatctatatagagaacctaaagaaagagacaaaaacagatacaatatagatactcaaaagttgaacttttctacagcacgtttctcaccagatgaaatcgaaaagcaaaaccatgatctcataaatcatgctaatgacttcttaactaatgaagatactggcttaccggttttcttagaaccagaagctgtgcaattacttagcttatggtgtcggaccccgcaacaaatgcggcgcttcattggcattatcttaaatgctaagtaccgagttgacaaggatcatcaggatattggggttctaatcccgcttgacgacgaagaacttaaacctttgatgactaattacaaaataacccctcgaaaacattgaaagaataaccctcaatatctataatatagatgttgggggttatttgtcattatatactaaaaataacttcttctatttgtcatcaatactaaacaataatttgtacaaagtgattatttcttctagttcttcacgcgatacatgatcgacaatagtttcatcagtgacatgtcttgcccgtaaatctagggctatggtttgatctaataatacttttccatatactgtttgactactagttagtcgatgatacattggaaaattacgcttggtactgctaattggagccacaatcgtcatgttacttgtctgacagactagatcattgcttagcgcaatggctggtcgcttattcatctgttcatgaccacggcttggattaaagttaacataaaatatatcaccttggcttaccattgaagttcattaccttctgactttccccaatcaagctcgtgatcccttttcccgtcatcttgccaatccttaaatagttcgtgaatattggttgggttcttttttattggtgttaaaacaattgatccattttcaatggttattgtcatatcttggttatcatctaatttcagttgtttaataatttggctaggaattctagcagctttcgagtttccccactttgctaagcgtgtttgttctttaataagttccatattttcccctcctaaattattattacaagtcaagtatatcccgtgtagatacacaatgcaaatattcttactggaggtcatttacatgcaacaagttgtcttacccatcaaagattcaaacgttcttaaagaggttcaagatacgttactcaataactttaaagctggccgacgtaactatacgatttttcaagttggtaaagctgcgctactgcgagtgagtgacgttatgggtttaaaacagaccgatatttttaatccggacggttctattaaacaaaatacgtttattcacgaccgaaaaactggtaaacctaataccttgtaccttaaaccggttcaaacagagctcttattgtaccgtcaatggctacttgatcatagactagcctctgaatggctctttccttccattcaacaccccgagcgccatattacagaaaaacaattttacaaaatcatgagtaaggttggcgatctgttaggaattaattatctgggtactcatacgatgcgcaaaaccggggcttatcgcgtctacacacaatctaattataatattggtttggtcatgaatttgctcaatcattccagtgaagcaatgactttagcttatttaggcttagaccaggctagtactgaaacgatgctagatcaaattgattttggttgaatgcaatagcatataactttaaaataataatatatatggtataattcaaatatggaaaagccagaatttgaaacttacaaacgtcccaatggtcatgatgaattcgatgaatggttacagcaactgccaattaaagatcgcgctaaattactgcaagtgattacagatacgcaggatcaaggtttactagtcgctcaacgcatgacttgggttaaaaagatagaatcagctaaaaatttatatgaattaagaagtaaggtatccagtaatattcaacggacattatactttcacgttaagggaccaaaacatgtgattacccatgggtttaccaaaaagacacaaaaaacaccacccgctgaaattaaacatgcgattgaattacgaactgaatgggaggatagtcaaaatgaaaatcaatgatattttaacccgggaattaaaagaccctaagtttgctgaagcttatcatgctgacaaggaaaaatctgccagtgccttagcgttgtatcatactcgtgaagaagctggcctaactcaggccgatttagctgaaagagcaaacgtccctcaatccaccattgctagaatcgaacgtggcgataatgtaacgtttgataaactagctgaaattgcccatgctatgggtaaaacaattaaaattgaatttactcaataagttagacctttaaagaggtatttggcagcagttgatttaatcaactgctgcttttttgatcaagctaaattagcttgcgccgtttgcgcaaaactccgcctgaaaggctcctgctgaaggcatgctcatgatgcaaaatcattcggccgacagcccctgtctggaagacttttttactcaaattccgatagcaattttgagtaaaaacgcgaagctttgccaaaaagtggctagccaatcggctaaccattttggcattgcacagcgaacttgggggtcaagggggaacgttagctgtcccccttgcaagcaccgcagctgccacaaacgtagtcttgtggctagcttgcgggttgcttgccaatcctctgttattcgattatcattaggaggtcatcagccgacggctgatccgacttttgatatctcgaataactttgccgcagggcaacggaggtgggacttgtgaacgaaccacaaaatctggctagcacaaaaaagacgactcaggttcatcgtcaggctagcaaacaaattaattttcgggtgagtgaaccggactatttaaagctggcgcgttcggcgcaaactttaaatctgtccgtgccggcttttgtcaaaaagaaggcccagggggcgcgcttagttgcccctaagattgctgcccaagatgcccagaacatcactcatcagttagctaaaattggcggtaatcttaatcaattggcccatcatgctaatcaaggtggtcaaatcgatccccaagcattaaaggatttacaaaacgaggtgcaacgcgtatggcaacaactcacataaaacgttccaccagtgcatctaggttagtcaattacgctgaaaaacgagccatcaaaaaagatggcctcaatttagatattcagtacgctaaaagcgaatttaaacaagtgcgggccgtctatggcaatcctggtaaaacccaagcgtatgccagccggattgcctttagcccgttggaatttaatccgcaagatcctcatgatcagacaacggttttagccgttgccaaagaagtttatgccaaagcctatcccaatcaacaggtggccctttatgaacatgccgataccgattcgttacacgtccatgccgtcattggcgcgattaacctggaaaccgggcaaaaaatgcacggtaattggcaccaatatcgcgatcacttagtccacatcacggatcaagtgtgccaggaaaatggcttaatggtcacccggcccgatcctaaccgtcacgagaaacgctcaatggccgaaattaagctccgggctaaacagcagcccacttggaaagatcaaatccgccaagccgtcgatcacaccatgcagaaccccctgattcgcgattttcaggcctttcaggacgacttgaaacaacaggcagttaaagtagtatgggaacggggcaaaaatctcacctatcagctattagggaccaattacaagtctcggggaaccaaactcgggcttgattatgaaaaggagacgatttttaatgagttggcaagccgacaaaaccaaacaagaaccaaccagcaaccagaacgaaccgttaacccaacaattgacccagctcaatcagaccatagccgaactccggaattaccagggcactcagattcaactgcaagccacagccaaaacgtccctcgatcaacaacttcatcagatcgaacagaccgcccaacaagtcaatcaacagtttcagacgaccttaaacaacttagacagcagcaacgccagctcgcaggcccaattaaaacagaccttacaaagcgcctacgcagcattccaaaagcagaccaacctgatcagtcaggaaaatctgaccgcgctcaaacaaattcaaaccgaacaagccaaaaacaaccagcgcctcagccaactcagcgaccaagtgaaccagaccattcaagagacgatggcccaagtcgctgatcaaatggatcagcagttacaaaccacgaaaaagcggttctcgtggtatgaaattaagaattatctgctggctgtgatcccgactggtattctgacaggccttattttctggttattgaccaagtatttcggttagttcaagttaagctttcaggtttccgcgtcctcaattgctgacaattttatttcagggttaaaccaaattggcgttttattgacatgaatttaggattttgaaaccaattagcgtcttttttcgcttattattggctatatttatcgtttctaagccattttaaatcatctctggtgtattttatatgccagttaactaaaacggctgagaaacgattttagagctaatctgaaatgaccccttgatttttgaattcttctgagtgttgcgcccgatatttagccccagctagtttattccagtaaataccgaacagattcgtcatggtcccgtacaaatagttttccacgtccttaacatgcttctcgttacttctgagcacgttaaagtatcttctcaaggtcttagttatcagtggtttaagcgtatcgtcacctaaattaattttgactcctaaggcttgatgttctttttcgaggttgtttttagcattcaaaatgatgcggataaagcgtcgcatttgttgtggtgttcgacaccagaaactgagcagttgaatggcttcgggttctaagaagacttcccagccactttctggatcggttaaaaactcgtcagcatgttttactaaatcccggtttggggtttcaatttcagctggtgaaaagttagtgcaagaaatgccccacaatcgttagacttcttgtctaacaattgtagggcacttcaaatcggctgatcgaggactttttggtattcgtccagcacgtcattcggcaagggcgtcagtaaatgcaggtcatcgatgacatcgctggccgtgtcggtgctgggcaaatcaacgaaaaggtcgattttactgagacaatcacttagtagatcggtcagctgcgaaagcggcttgccgttttcatcggtgatcacgacctggcgatgattgaggggctggtgctcgatctgaatcattttcagcgcatgataaacattcaactggctcacctcgatatggttaccccgattgtaggcaatctggcccgaaaaaacaatctttaatcatgctctggggctaccggcgggcgatgccaacgcagccacagttctttgattccagacaaaatgagggtcggtagcgccgggataaagactaccgcagcatacagcgtgctagaaagtggcgcggtccccatcacttcgttgaagaacggcatgatggtgacaagtaatgaagccaccgccgcgaaagccactgccagcagcaactgatagttttcaaacgggttgcgggcgaacaaagtgcgggtgctacgcgcgtcgaacacatgccacagctggccaaacaccagggtcaaaaaggcgagggtttgcgcttctgcgccgctcatgccttgactggcagcccagatgaaggcgacatacacgagcccacccatcacaataccgcgcaggaagatgcgcccgagcatgccatgcaaaatggattgtttcacattgcgcggcggctggttcatgaggtcggcttctggcacatcatagccgagggcaaagctcggtaaagcatcggaaatcatgttcacccacagcaccatcagcgccgttaatgttggggtggtggccgccacttggccgacgggttgcgtcatcagtagcacgccgaacagcagcgccaacacctcggcgacattggtggttaactcatgccgcataaagtttttgatattgccaaaaatggtgcggccggcgcggacactgcgctcgatggtggtgaatttatcatccagtaaaatcagatctgcggcgtctttggtgacttcggtgccattaatgcccatggcaatgccaatgtcagcagcgcgtaaggctggcgcgtcattgatgccatcaccagtcatggccacggtttcgccatgccgctgcaaggcgcgcacgatgcgctgcttgtgttccggcgacacccgggcgtatacgcggatgcttggcgcgagccggaacaaatcttcatcggtcatggcttccagctgcttgccttccactacccgggcgctagggtcggtgacaatgcccagctttaaggcaatcgcgcgggcggtgactgcgtgatcgccggtgatcatcacgacctgaataccggcttggtgcaaggtggtcacactttgacgcacttccggccgcggcgggtcaatgatgccggcaatgcctagtaaggtcaggtgctgctcaagctcagcggtgctaccatgcaacgccaggtcctcgtcgatgtcacgcagcgtcaccgccagcgtccgcagcgcctgttcggcaaagcggttgacctgcgcttctaccgcagtttgaccagctggcaatgttacgagttggtcgtggtccagaatggcatcagttttggctaaaatcacgtctggcgcacctttagtcagcacctgatactggtcgccatctttaatgacgacactcatcattttacggtcgctgtcaaacggcagttcgcgaatgatgtcgatgtcctgcgcctggtctttgctcaaaatcgtatcgcgatcgatcccaaatttgtggcccatcactaccagcgctacgtcggtggggttgccatacgggcggctgcggccttcgtcgtcggttttaatcgccgcttcgttattcaggacagcggccatcatgaagcgcgaaaagccgggggtgtcggcttcgtcatcagggatgatttcgcctactggttcatagccgtcgccttccaccacataactggcgccattggcataaaaccgggtgacagtcatttcatttttggtcaaggtaccagttttatctgaggcaatgtagctggtggcccctaaggtttccacactgttcagggacttgatcagaccgttgtttttggccagcatcgtggccccgaccgtgagcacaattgacagcaccgccggtagcgcatcgggaatcgcggccaccgccaaggcaatcgccgtagagagggattcggccagcgcagcgaaggagagactgccagtttgctgataggctttcaagagctccaccagcaacgtgaacgccacaatcaccatcgccaccatcatcagtttggtggtcaggcgcgcaatggtgcgttcaatcggggtctttttgtccttgacttgatccagcaaggtggcgattttgcccagctcggtttgcatgccggtcgcaaccaccaccccgaggccgttaccatgcgtcactgtcgcaccagaaaagcccatgttggtgcggtcaccgatttgcacgtcagcgcccaatgcgtgggtttgtttttgcacaggttccgcttcgccggtgaggtgggcttcgttggtttgcagctcggcgacatggagccagcgaacgtcggcttcgatgaagtcgccggttttgacactgacaatatcgccaggcaccagctcggtggctggcaccgtcagccagtcgccatcgcgcaggaccttggcgtggtgatccgccatcaccttcagggcgtccagggatttttgtgcgcttttggcttgccagaaggagaggccggcattaacgaaaatcagcagcagaatcgcaatgctttcatacactgccgccataccatggctggggtcgtggcgcacgaagaagtcatagccggcgctggcccaggccaatagcacggcgatgaataaaataatcaccaaaggttctttcaaggtggccaaaaactggcgccaggctggtaggggcttgctggcggccaaggcgttggggccatgctgggtgagccgggcctgtgcttcttcactggtgaggccgctttgctggctggtggccaagcgctttaggacatctgctttgtgttcgttgtaaggggtcataagtttcctcctataagaaaaggccgcacccaagaatcgctttcctccccgagaaagctttcttgagcaccgcccaaccgaattttttgaattagttaccttttattgctagtttaaaggatacctaatgttgctgtcaaaagatttggcccgggccgccggtggcgtgggcaacgtgcacgttttctagtcgctaaactgtgaacaatgctcgtgctaaatgcaaaactgagcaaggagatgaactataagcgggggaccctttgctattgaggaggaaggcgaagtagagaaagagcggtgatttgaactcgaaacagcggtgccgcaggctagcagcactgttagattaatcgccagcagcagatactagacagcttcttatattttgaaaaaagacaagaagctattattaatcgtcctggcttcgttatttagccctctaagagcctgttgagggctttttgtttttgctttggtataaataatatataaacagtctcaaaaccgctaaaaacgaaaaataagacccttaaaaacgaacacagccgctaaattcttgttaagattcagaaaaactaactgtttgctgtcaatggtagcggacgagcgtagcgtgggagcataaggaattgacagctctaaatcagtcttagaacctgtttgaaatcttcttaggagtaataccagaaacgctaagataaccatttgacgacttgaattgagtttacgctcacagttcttccaaagtcgtcgacatttatccaaccaactgaaggaacgttcaacgatccagcgttgtggcagtacttcgaatttatgaagctcattgcgtttagccacctggacggtggcgtttaaattagtgtaaacatcagcggcaaaattcgatccagtgtagccaccatcgacaagaaccgatttaacttgctgtaaatgcccagaatttagagctaacatggcactggctccattacggtcggaaacattggccgtggtgatgtgaattgcttgtggtaagccgttaatatcaaccgctaggtggcgtttgatgccggatatgcgtttaccaccgccgtagccgcgatgctcagcagtatcggtatttttaacgctttgtgcgtcaatgattatgaaagatattctagccgagcgtgactgtttttcccgtagggtaaagacaatttttttaaacactgatctaagattgatagttcatcaataatctgttcctcagaccatacgcgataatagtaatagaccaattgccagcgaggaaaatcaactggtaactcgcgccattgacagccagttcttaaaacatagacaactgcacagaacaactcataaagatcatactttcgaggcctcgttgaacgccgtgcagcttctaagtcgggacgaatgagttcaaattgttggcgggaaatattgcttgggtagttcatgactaatcaccttttttgaactatcataccaaattagctagattttaaacaggttcttagtcccttctccacctccaaaaagcttatcaattaactgattattattaagcaatgcttcgggcacttgatacccggacgctagtaccactaaccactgaaaaaacgttgtcataaccaaacccctcactttcgatttacagttagcttacctactgctcatcaaaagcgagcaacactactcaactgataatggccgaatattcccggcttaaaacccgcctaggcggagtagcttgaatcgtgattatgcgtctcacgtgaggagttagttctaaacggtttggaggcgacgggacgactaataactaaataacaccctaatctagcccagttaacacccagcaggcctgcccagtccccaaccaagaaacccgtgtccagaactatagatacgtaatggcattttagaacactaaattctaacccgtatctagcaaattcaattgggcattgcgatgatgatcttggcgagcatcaaggctcaattgttgtagcgccactaattcttctgagggttctaataaccgagcaaccgttatccaatagtttaatcgctgttggcgttgtaacctcatcgcatgttgtaacaagctactacgagtcgcaaacttcgttgcttgccgaccgctacctttttcacgataaactaagccttgatcaattagatctttcagggccttggttagactacctaagcaaatatttaattcttgggaaatgtgccgtaaagacgttttggtaaaccaattattgtcctggaaaattctttggttaaagtaagccataagatctgcttgccattcatggacatgactattaacgcgttctgaacgtggcttcgcatacttgtaccaggtcgtttgcgaacgctgcaaataaactcgcctgtcagcatcgggaacccaagtttctagcaacgcattcacatattcacgactggccgcatggaactgacctgaataagcatcattaattactttttgaacgtgctgtgtcgccagcgggtgggtaagattactgttaaactcgtccaaaatgtcaaaacactgggcttgtaacacgtttgaagaataacaagctaaggccagcgtgaagattgtattgtgccgaccatagcccacgttttgatcaatgtccgtttggttaattaaggcttgaaaccacggttggtcaacctggcgactagtccgccgagcataaaaagaccgttgagtagtttggggcttaatttggtgctgatcattcgcaaaattaatactccaagtcattaaagcttggaagtcaaccgtcattttgggctcaaagtattcaatattgtccggccgcggaactctgaaaacaccaaagctgttgcaggtcacatcaaccgccggcaatttttgcgcgtagtattgctttaacgacttagcaatggctttagcagccctgacggctggcaattgaccattggcatgacgacggacgaaaaccggcctatcaaagacgtagtagatatgatagcccttggtagtcgccaaaattaaggttggaagaaactgtacgtccaacatcgccgtgtcccaaacctcggcaaacttcgcttggcgctcctcagcgtcacggtagtcaacatcaaccactaacgtattgatctgacttaaattttgttccttagtgccttttacataatgcttagccgcatcagtataggtgaggtagttaaaaacattgggcgtccaatgcgtgctggtcgcatagttatcatagactgcttctttggaggtataaatcgtcccccagcttttcgccatttggcctttactacgatacatggcaatcgcaccttgcttattttgttgccccgaaaccgatttttccaacttcaagacgttactatgccgggctttagtttcccgtaacccttgatgcaaaatcaaatcaatcgcttgttgtgccgtttccgtcgctgacatactgctcacctcctacaaaaaaagaacgccgtagcgttcttagtcatcatttttatgtattaaaattaaacgttcaaacactagatttttaagcaatcgctccagttaacgtggctacttggtatttaaaccccaacttggctcttagggcggtcaaattcatcaaactgcattcttgccaaacgtaactggcacgagtacaattaactcattctttggtagttctatgagttcccgtggcttagaccccacggggatttttttgtttatttaatttttaattgggattagcttaacaggtttcaacaaacatggagcacttctccctctaggcttaactacacaaaaagcagattaagccgcccactggggtaacttaatctgctttaactaaacctatgtatgcgtttaactcgacttttcgactagcatattcctaataggtttagtataatattcctatcaggcaactagagttgactgcttttagtagttcacatcctagctagccatctataaaagacgagcgttaaaggcgatcaagtagccttggtacttgatttgctggttcaaaaattattggagtaatttttgaaccaacgcttttttttatgttacttattttccatgtcttgaatatacaatacttttcattgtttgtaaacacttatttagcacaagtatactattgctaatgtagtatacttgtgcactaatcccaaaatccactaatgtaaaagtggatttttgtaaaagtatacttttacattagtatactttttcatttgtgcttgatatatcgttatactgctgtataattggtttgttagcaaaagtatacttatgaggagtgttgaatgtgacaaaagtcattgcactgagtaaccaaaaaggtggtgtaggtaagtccacaaacaatgttatgtttgccattacagtcgcaaaattatttaataaaaaagttcttcacattgatatggacttacaggccaacagtactttcatgctaagcttgacatttgaccaaacaacttggccggcatcaataactaaatgccttgatgacaaggacttagaagagggcattgtacacctcacagacaatttagatgcaatcgcaggtgataaagattttcgtaattggggtacatggttagctgacaacgtcaaaggtactcacaatcgaacgttttatttcaaacctctattagataaaattaaggatcggtacgactatgtttttattgacactccaccggccactgatattaaagtagacaatatcatggttgccacagattatgtggtagttgtacaagagactaaaaggtttgctttcgaagggtcaaaagatttgacaagttcatacttacaaaccttgtataatgatttcaatgatgaaattaatatacaagttgccggaattctcctagtacttcttgacaaaaatcattctgttgaacaacgaattgtcaaaaaaacgaccgaatattttggcaaagagaatatatttggtcaaataattaaaaaccatttgcgtttagaaaactatggcgaatatggtgtacagttcaacgactggcatgatagtagaatgttggcattgttctctgatcttttccaggaattggaagaaagaattgaacagtttgaaaaatacggtgatattaagcctggctatcaatatgagcctaaatatgtgattaacaatcgtctgacaactttaggcaagaaggagttgaaaccaaatggccttgattaaaaaagatgccgacgctttacatgtaaacgtagaaaaaaccgttgatgacacccggaaacagaaaactattacagctaaggatagaaaaagccttcgtgttgatccagatacttatgacacgattaagagtctggcatatatcaaagataaaaagatatatgaaattgagaatgaaatggttgaagcctataagcgagataagctttctccacgcgaaagagaaatatttgatagtatgaatagatcagccaaatagaaaagtacattagtatacttttctattagtatactaatgtacttttaagttgtagtttctgatcttatttagttttaagtttttaaagtacacaagtatacttttccattagtagaagagtatacttgtgtactttaaaaacttaatttagttgtaataatgcaatattttacaataagcggtgctgtttaattagcagctccgcttattatttttaaaaatcaatctaaatatgctctacgaaaaatctaactcaatcatggactcttccataccgtcaagaacctcattttcgttgataaatttaagccacttctctgctggcgtaaatcgattagctttcacttgagtatgcagtttcccatacaagttctcgacgacctgcgcatacattttctcagcctgacgagtgatctgttcttcattccagcgtttagctggctggcgttttttgttcttactattgagatacgccagggctttttgcataaagatagcttccacttggctgttatcactgataaatttttgtagttgaactgtgttcatttgaacgcccccatagataatttctgtcaatttatacatttattatatcacttttgtgaacatatgttccctattgtggtaaaataaacgtaaattattgagaaggtgagcttatgttttttgatcaagaaccgcatggcgtgttctttttaatcgataacaagtccttttatagcagctgtgaagccgttgcccgcgggcttaatcctttaaaagtcccactagtcgttcttagtgaagctaaaaacaccactggtgggctcatcttagccacgtcacccgaggctaagcagttatttcatcttaaagccaatgtctcacgcaaacgtgacttgcccaatgaccctagactatggatcgtgccgccgcgcatgaatctctatattcaacgcaatttgcaaattaatcaaatttttcatcaatttgcgagtgaaaaagaggtttggccctattcaattgatgaaagtattttggatatgacccattcatggcggctttttggcaattctatccgtgaagtggcgcggttaatacaaaaaacgatccgccaacagctcggtttatacaccactgtgggtattggcgacaatccggtgcaagccaaactagccctagataactacgctaaacacaatcatgaattgattggtgaaatccattatgaaactgtgccggataagatttggtcaattaacgaattaacggacgtttggggcattggcccccgtatggcgaaacgtttgaaccgccttcaaattcacaatatgtatgagttagcccatactaacccttatttactcaaacagaatctcggggtgattgggagccaattgtttgccaccgcctggggcgttgaccggacccagttaactgaaccaatcaaaactaaggaagctagtcttggtaactcacaagttctcccgcgtgactacttgacacaaaacgagattgaaacggtcattaaagagattggtgaacaagttgcggcgcggcttcgtcaccaccataaactagcagggtgtttatcactaagcattggtttttcttatgctgcggctgaaaccgatggccgcaatggctttcaccaggctttgaaaattgaaccgactaatgataaccaagctttaacgcaacaattattgtggttatttcgtaagaactgggacggccaagctgtccgtaatattggcgtttatagtagtaagctcagtcctgacgccgggcagcaacttaatttattcgaatccccgcttaaccaaattcaacatagtaagctaaaccaagttattgatgaaattcaccgacgctttggtttcaccaaactcgtctatgccaccagtctattgcccggtggtaccgctattgaacgggctgctttggtcgggggtcataatggaggaaatagttatgaataaagatttagatattatcacgagtcgcttagccttgttgtttaaaccgactagtcgaacccgttattggctagtaattgccaatgacccgtacgattacacttacaacgtattcttcaacagccagcgagctaatgagcgactacggtcaatgcctttacacaaactcgctaattataatctcaatgacttagaaaacttactaaaggtgttgcggcaacagactaaattaacgattgaatttattggctttacgggtcaagtttggccgcaaagtcaaaaaattattcaaaagaggcggcaggggcttgaatgaaaaggagtttgacctcggcattgttaagcgcttctttgagcacgattaccatgatcgtggcctaatgaaatggcaaggcttttacttatctgatcatactgccgctttaaaccaacagaagatccaagataaacaacaatatccacccgagccacaacagtctttaagtatcgttggtcaaatcttgtcaacagcttacacccagaaccaaccagtcaacttacaattaaataccgttgatcataataatcaacactttgcgaccatcacaaccccaatactgggctataatggggctactattgtgcttgccaaccaccaatttatcaatattaatgatattcagcacatcgaattagtgcgctcaactaactggactggcaatcaataaagaccaccaaggcgctaatgccgaaccttggtggtctttatttgaataagtgcttgtgctagtaattaccgtttagatattggccactaaagaagcaaagaaaaacatatataggacaaaaatagcaatcgaaataataaattggactattcctgctcggttccaagtcgcttgcacggccttgaatgtctcgacatcttgataatcacctttttgccaggcccattcattccccttaaaaccaaccacaaaaacccaaacgatattaaaaattggaattaacgttaataacggcaaataggttttattgccaatgccccaaaaaatactgtacataaatgcgccccaattccaccctttgaccgcttgtggcacttctttaccattttctttcatcattacgttcccccttaatattagcttaccaaacctaagctggcttgtatactaacctagtatacattatcgtgatattgtattacgtcgagcagctttaactgggcctagattcaagctccgacgtcttgcttcacgattagccaactgcaagctattattcaccttagtaatttgttcagaatttaccgtcttttgaagccgctttagtccattaacttgttgttttaaaccgcctaaggaatcgttaattcgatttcttttttttacgttgaatgtcaaccagtacagtttgaatttagacatgcttttggtatactggatagggtcaattaacgccgttttagctcagcaggtagagcacttccatggtaaggaagaggtcggcagttcaaatctgctaaacggcttgctgttagaagatgattggcgtggaatgcttgtttaactgttttttctgcaactaatcatcacattagggtccatgtttaagattaagacttgaacgaaccaaacttaatacgaaaagaggtccacacgctcgcattagattagctaagcgagcgtgtggacctcttttgctatcaagaactgggagggcgagcttcaaccagtatataccccctgtgattgagcgtaacacttcattttgcagttttagaccgaacggcttaactatggtagctgctagggcgtggcagtatgcttgagattggctggccacgcggcttcaaattgcttgaataggggcattaatgattgtcgattgctaacaagataattgacatagattggcatgtgagcacgagtatcgctgatcgggatagcgactcgattgtcatcatcggcttggctatctagctggtgaggcgccaatgcggtaaagttagtactgaagtacgggaaatcggagtatttagtgatttctgtaaaggccgtgcgttggggttggtataagaatttagcatctgggatggcctgctgaataatatctttccaaataccgattgcgcttagaactacgaagctaattcccttaagttcggcgaatgtgatactaggttggttcgcacggtacatgaatcgctgtaaatggaccacgagattttcagtaccgatgaagcgagattcaatgccggccgtcagaatttcctgattagagaaaatgaaacttgcctggcggttaatgagatgctcagtgatttggtcgtcggcaatcaatggttgcctaactcgcaatgtattaggtaataccgttttgagatgggtgagtaaggcaagtggaccaggtagggtggtttcgacggtacgtgtgactaagctttgctcgtagttttgtattttggttacaaaagtccgttgttgtgtcaataattgttcagcttcctgagcggctaactggccagtgggcgtcagtgtaattcgattgggttgacgatcaaataagcgaacagcgagcatcgtttccaatttctgcatgccgcgagtgatagttggttgcgtcacgtttaatgcggccgcggtcttagccagcgtgtgctcgtgggcgaatgtgatcagctcttctaataaataattttcaatcatcaggaacctccgttactagtatgcgctatatgtatactagtatgaataagtagtaattttcaagtattaggtttgcgggtatgcttgttattgtaatcaaatagtgaaaggttgatgcgtgatggttccaacaacgaaattaaacaatggtgtggttatgccccaattgggattcggcgtgttccaagtccctgacctgaatgaatgtgaagcagcggtgaccgcggccttaaaggctggttaccgtttaattgatacggcaacggcataccaaaatgaaaccgcagtggggcgggcaattcaaaagagtggtcttagacgtgatgaactctttgtcacttccaagctgtgggtctcagaattcacctatgaacgtgcaaagcaaggtattgatgcgtcattacaacgtttaggcgtagactacttggacttgtatcttttgcaccaaccttatggcgatgtgatgggtgcttggcgtgctttagaagaggcttaccatgctggtaagattcgcgcaattggtgtttccaatttttatgcggatcagctaaagaacttggaactgaccatgtccgtgcaaccagctgtcaatcaaatcgaggtcaatccatggtaccagcaagcagacgaggtccgctttaatcaaggtgaacacgtacgggttgaagcttgggcaccgtttgcagaaggtaagcatgcgattttcagtaatccaagtattcaaactatcgcacaggcccatggtaagacgaccggacaagtcatcttacgttggctgttgcaacgcgggattacggtgattccaaaatcagtgcatcctgaacgtatggctgagaatatcgctgtttttgattttgaattaacagctgcagaaatgtcagcaatggccgaacttgatcagggcgtcagtcagttctttgatcatcgtgatcctgtgacaattgaacagatttttggcgctagtttacgacaattacatgaataagttaaggagtgattattaatgacaaaaacaccaactattacgctaaatgatggccgcgcgattccagcaattgggtttggcactttccagattccagacgacggttccacttatcaagcagtcaaagaagcattggcgattggttatcgacacattgacacagccgtggcctattttaacgaagacgaagttggtcaagctattaaggatagtgggattccacgggaccaaatctgggtgacgagtaaactttggctccaagactacggctttgatgcagccagttgcgccatcgatcgttcgttaactaagttgcgactagactatattgacttgtacttaattcatcaaccttatggcgatgttccgggtgcatggcaagcaatggaagcagcccaaaaggccgggaaattaaagtcgatcggtgtttccaatatgacaccaacgttgtggcaaaaatttgtgccacaatttgaaacgatccctgcagtcaatcaggttgaatttaacccgtactttcagcaacaacccttgcgccaattactcgcggcacaagatgttaaattagaagcttgggcgcccttgggtcagggcaatcaagcattattcaaagaaccaatcattcaacaattggctattaagtatcataaggatgctggtcaaatcattcttagatttgaacatcaagaaggcgtgatcgtctttcctaaatcagtgcacagtgcacggatcaagagtaatcgggatatcttcgactttgaattaacttcgactgagatggcccaattacgagctttagataccggtaaaggtcaccacgacccagatgcgccaggggtttcagaacagttgttgcatgcctttgacgtgcatgcagatgactagcggcagagccggccaagtcgcggacgaacgtaccgtagtgtaagctgctttgattgtaactgaaaattaacgacgccatggacgctagaatcactagcatccatggcgccgttttttgattaaggcctttaaaagccgtaacttgaaatggcgacgaataaaaatcagcttactaaaatggggcacgttacgactaatgccgaatgatgaagctgaggatggctggttattaatcgctggcgggaacctcattattgataatttgctcgttaaagtcagtgaagatgcctagcagggtcttcacccgttgcgggcccaattgagtcgtccactggtgaaccgttttgtgcatggtggccattagttgctgatctaggtgacggccggtagccgttaaggaaagtcctttttggcggcgatcagtggcattagcctgttgctcaatgtatcgatgtttgaggaggactccgatttggcgtgagattgcgctgcgtgagacatggtgctgatgtgcgatctccattaataatagtggctgggggctttgacctatttcatgcatgattaaaaaagcgtcaaaggtaagatgttgcgtggccagtagtgaatttaagcgagtattcaggtaacgagagatattggcataatcggtcaaaaacatgtcgagagcgtcgacggtagccataataagaacctccttgaagagcgactgcttggtaaatttggattgactatattcactaagaatcataccgctaaacgtgtaaaaagtgtaagattgtgagccgcaaattagtgactgaaatgttacgtgaacacgcatgcctactagcaacggttggtaataccaaaaccatcgctgacagttttttgcgctgtcagcggtggcgaatagattatcgatcaacgttacaaaaaagtcagtgagtccgcaggcgtagagcgacgatgcgggcgtaaagatcggtgacgcactaagcggttttagtgcgatgacgacgagcaatcatcggcaaaatcatccctaaggcaacaaagataattggcgttagaatatttaaagtcagttggaagagccaactgctaggattgctagcgtaggaagtctttggaaccattccgaggatgcaagcaaatgctgtaaacaggaagcaccaagcaccgaccaaacggccagcgactgggtttttcaggaacttgtaatcactcttgaattcctttaagtgcttgttgagtagcatgtaagctagaaagacccacaggtagcgcatcggcattacgaccgaatttaagttcaataaccaattaaagagttcattcatgtttccaatccctaatgcaggaatgataatgagaatgctgaccaaaaccccagttaagatgtaaccgttgacgggcacatccttcttgttcattttacttaattttttgggaataaattcagggtcggcatcaccaagcaaaatcttcaatggcgcatcgattgagaacgctaaggcggagatttgggcaagcacattggcaattgcgtagaggatcaagaacagattgcccacgtggtagaaggcacctagtcgttgaaacgcgtagtaagcaccgttggccatcaaatcagcgggaatgtgcttggagttaaacagaatccccatggcaaatgaacccagcagggcacagattgcgaccatacctgcgagcactaacatgcctaacggaaactcacgtcccggatttttggttttattaacgtacggcgaaatcttttcagatcccccgaccgcgaagactaacattgaaacggtcgtaaagtaggtaaagtcaaacttaggtaagtaggacttgagtgaaaacatgttcggtgtctgaacagtcgccttggtcataaacggtgctgatacggccaagatgatgaataaaatcgacatgatgaacatccccgtaccagcaacgctcccgatgcgtttcagtgtcgttagtcccaatgaagcaatccagaggaagaataagaatagtactaaacaaatggcttgaacgactaacgcaggtgtcgtgttgacgaagttcccattaccgcggaacagccagctgaatgcaattagaatcccttggggtttttgtgctaagtacggaatgtgcacgatccaataagtccaggcagcatagtaagctaggcgcttggtactcgttgctcgaatccaagatgagacgcccccctcagcatccttaaaggtcgaacccagttgacccacaatcaaggtgtagggaataaaataaataatcatgatcaaaatccaagaagtgacgactgaaagcccttgtaacgcaaaattattgacaacgttacctaggccccagaccgccacgaatgcaattaaagcaatgttggaccatcgaagttgtttttcgttttccatgttgaactcctttgtgagctaaagtatgcttaattgtaaggccaaactgaaagcgatgccagtattaacaagttaatattaaaagcgctttaaattttaagtcaaaaaatgaattttgagtgtcaaaacagcgaaaatttgctattgttaagagtagataaaatttaacggcaacggacgcgcattgttcgaatgaaaatgaaagcaggaatggtcttgaaagaagttacagttggggagttaacgttagcgacagggatgcctaagattggtgttgttttagcgggggccacacgggaggacctcttgcgtaaagcggggcagattttaacttcggtggcacaaattgttgtttggcggttagatccttatcaggaattggataaccgtgcggagttagtcaatacagcggcccaattgcaacaagttttggggacgattccattaattgccatgtttgggctggcaaacgatccagctgaagtgaccgaatattatcaaacttatcaaacattagtgaataatcgaagcgtggctggcgtggatattgacttagccatggtcaatcagccagattttatgacgttgaccaaacagatgcgtgacaacgaaattcggttaattgcgagccagaccgtcacgacagcaacaactgacgatttattggcgacttatcacgaattagcagcaactggtgctgatgtcgtgcgggtgacagtggctggacatgatgcacagacggtgttggcattaatggcggcaactgagcaagcacggcagcaattagttgtgccaatcgtggcaacggcgacgggcaagtttggtcgttataacagtgtctgtagtcagttgacggggtcggcagttgcctttggacacgtcggccgggtcggtgatcaaagtcaattagcagtgagtcaggtcaaacaggcgttacaaatgttggcaccacttgaaggggcgtgaaatcaatgcaatggcgatcgttttggcggcatacccggacgatttttgaaacgttagtcatctatttcttactgattcaagggccgtatgatttgtggatcggcaaggtgggctatcgacttagttcgtatttaattgatattgtgggtatcacggtgctgtttgtcatcgttgagctagtttataatgcgattcgacaaatcgttgtgaaacgacgatccaaatgactcggggccgagtgacaattatcgtatctactagctcatgattacgcggggggagtctttcgattcaaattagggaaatacgctattagaatgggtaaaccaggtcttgagcagtaatattgctcaaggcttttttgatggccggggattactggaagacactggtcagtcgccatggtgacagctgaccggtgcatgatgcaactgtcagtatggtgaacgaatagtggtggtcgaatactaaaacgaccagaattaatgaatcaccacgatgaaaacgattgcagaaatagggagttgataattatatttttgcgataaacaagcggattaatcataatgataacaggttaattagaattgtgataatcagttgagcattatgagggtaccatggtatatttaaaaaccgtaaatgatgtactagttaaacacgataatcaaatatagtaagaacactttatttaatgagattaatcgttaggtcagttaggttgtttttgaagaaatggggaattactatcaattaccgtgaatcagaagtgaaatgttataaaatgtataaaagtggcaagatgtggttgtttgcgagcgcttcactattattgttgaatactcaactgttaaccgcacatgcggatgaaccaacatctgcatcgactagcgaaacgagtgtcgtagcgactaacggtgtgtcaattcaaaatcaaggtagcagcaatcaaacactggcaagttcggtttctaaaacggataacgttgtcgtggctaatgatgagaacgcttcgattactaatcagacggtaatcgatgcacagccagctactaatgacgagccgcaatccgctgcatcaacggctgcgttgaacgggacatctggcgcgcccaatagtgaggtagccgctgattcgatggcagcagtgaacggactaaacacggtagcgcccgcgacgaacagttatgaagcatcacggactgacgatctgttcagtaatgccgcagaatcgactgttagtgaacaacagcctgaagcgagtgaacagttattactcgatactgctgacgcgtcagaacgtaaacccgccgctgacttgcaacatgttgagcagcatcagctggtagatgaccttaaggtggagtcacagcacgttgatactcgtgctgtgactagggcggatgaggatgaaatgtctggtaactttggcgttgattggcactttgatgccagtacaggcacgctaacgctgaacgggggaacgttaaataacagttatggggataatccttggcgtcgcaagtcttgggcgccgatgatcaagtgtatcgtgattgctgacaaaattgttgccggtactaacatgaatagtctgtttgcgaatcttgacagcgtgacgcgttacgaagggttagaaaagattgataccagtgctgtgaccaacatgcagtctctgttcaaagaaaatacctcgctagagcgactggacttgagtgcttggcaagtcggcaatgtgaccacaatggtgaacatgtttatggggaacttcatgggtactgaacttaaataccttaatctcagtggctgggatactcataatgtcgccaacatgcaaaatatgttccagttcaacggccaacttcgaactattgacggtttgactgactgggatacgcgcagtgtgacgacgatggctaacatgtttgcgcgcacaggcgtccgtcacttgaatctgacgagctttgattcagccagcctggttgaaatcgatggtgcctttgcgcagatgtccgatttggagcgtatcgaattcggtacgcagtttaccgtcgctaaagtcactcaaatcaatagtttgtttaatgatgatgccaaactaaaggtgctcgacttgtcccatttcaatatgcagagtgttgaacaaaactggcaaatgctagctggtttgacaagtttgcaaacgttgacacttggtccgggacttgattttagtcaacacggcacgcaacccttagttgatttaccggaagtgcctaagaatagcaaatataccggcaaatgggtcaatgtagctgatagctcgcaaacgtttacgagtgctgaactcctggcgcaatattcgggaaaccacgctgacacggcggcgtttgtctgggaaaccgtctctgcggccgcgattaccggtaaagacagcacgctcttcttgaatcaaaaatgggactggacacaaaatattgcgcaactagttgatcaaaatggccagttagttgatccaggagtcttgttcagtacagacccccaagcggtgacagttagcggtgagcctgttgacaccagccggccagggtcgtatcacgtgatactaacttatgcgggtcggcaaacaaacgtggttgtcacggttgtggctaatcaaagtcaactaaatttgcatgcgcaagaagttgcggttgaaattgatcccgcaacgggaagcgctgtctggcgcccacgggataattttgcgagtgcaacggatgcagatggccgttcagtggaatggcagaacgtgacggtgcttggagaaccagacttaacacggccggggacatatgaggtcgtttatcagttcactgacttgaccggacagttagtcacggcgacaacgaccgtcacggtgactgaacaagaggctgacgttgaagacctgacagaactggttgttcaagatacaacggtgacagttggcgaccactggcaggcggcagacaacttcgtaagtgccagtgatgcgacgggacggccattaacactagcggacttagttgtgattggtgacgttgacacgacgcaacccggtacttatgaaatcacgtatcaatacacgaacgccaatggcctgcagtggactcaaacagccaccattacggtagtcgaaggtgctggcaatggtgaaacgccgttaccgggagaaccagctgaaccggagttaccggaagaaccaggaacacccgaacagcctgaaacccctgaaacccctgaaacccccgaaacaccaggggaaccgtcagcgccagggacacctgatcaaccagaactgccggaagttcctgaacaatcagaacaaccgggaactactgaacaccctgatactagtgatcctaacagtggtttaacgggcgcaaacgctggttccagcagtcaaagggagcaagcagacacgatagtgcgaccagaatttaacggtggtttagagaagcaagtgaccacggtgtttcgtgataacttgaaactgaatacggctgaacgcaatgaggacggaattgatgctaaacgttatgctaaggctgatacagctaaaccggaagtgactatggccccagtcagccatccagcgtcagtagctggtgagctaccgcaaactagcgaacaagttaatcgcttcgggttgctgggactcatgatgttaatggtgactggtttagccagcatcgtcggcattaaacgtcggcaaggttaattaataaaggagtgagaaattaatggaacaagtgaagaaacggtacaagatgtacaagagtggtaaggtgtggttgttcgctggaatcacgctcgttacgttgaacatgaatgtggtgacgggacgagcagatgaatcaacacacgtagaagcattgactgaaccggcagtggcaactttgtctgaaggtaacgctgagcagcaatccccagtaacggacgccatggatgaatccgcaatgagtgaactggtaactgaagctcaaccaattaaagtgcaggccgctgaagaacagtatactgatgagattgtcaatcaatctgatgatgagcatgcgaattctgatcaggtcagtgtaccggtcacggatcaagttgacagtgagacccccgttccgtcagacgaacatactgcaacacttgatacgcatccgaaccaatcgacaactgatgattctgaacagccagttagtgccgacgagcagtcgcaagatattgacacggatagtactgcaaaagtcttgtcgtcgcagcataaaacggaaaccatcaatgagcggggaagcggtgatttggctggcgtgattcgaaatccagaacgcccacatctcacggatggttatcgcaacgatgatatggaagacgatgactcgatggccggcatctggggtgctggttacaacgccgatggcattaaatggcattttgacgcggattctggtgtgttagtgttggacggtggcgatatttacgattgctatggggatagtccgtggcaatcaaaatcgtgggtgttacaaatagttaaagttgtgatttcaaagccaattcgcattataggtgatagtgggggcttctttgaaaatttgacgaatgttgaacactatgaagggcttgaaaaaattgatgttagttctgcgacggatttaagatatttcttttcagaaaatacgcatgttaaggagctagatttgagcagctggcaggtgggaaatgtgactgatatgtcttacctgtttttcaattctccagggactagccaactaacgacaatcaatatttcagggtgggacactcgtcgagtaagtgaagcggactacatgtttggtcccaatgaaaagttaactcgtattattggtatcgagaatttgaactttgaaagcctaaaagaagcaggcggtttgtttatcaaaacggggttgtcggagctagacttatccaaatggaagactgatagccttgacaatatggctgcttggtttatggacatgcacaacttaaccagtgttaaattcgggtctcagttcaaaacagatcaggttacttggattcatttgctattttcaggatgttccaatttaactgaggtggatctatctggttttaatttgcatcgcgttgaacaaaatctcgacatgtttgcgggatgtgagcgtctacaaaaaattacacttggtccggatactgatttgacgccagccaaaatcgagtcggttgggctaatggacattgaagctaatgaccaatataccggttactggataaatgtagccaatccccagcaacggttaactagtgctgaactgatgaatctgtattcaggaaaaaatacgccgattggaacctacatctgggaagcaaaccaagcagttatcgatgccaacgacattaccctggaagttggcgatgattggaactggacggacagtatcgagagtttaaccgaccaatttggtcaaaaagtcgatgttcaggccctctatgtggctaatccccaggctgtgaaactatcgggtgaccgagtaaatacaagtcagccgggtacttaccaggtcactttcaagtatgcaggtaagacggtcactgctttggtgatcgtgaaagctgaccagacaagtttgactgtccatgatacagagttacacgctggtggcacttggcatgcgcaggacggttttgacggggcgacggataaagacggtcacgccatcgactttaacgatgtgacgataacaggtgaagtgaacaccatggttccgggtgattaccagattacttacacgtatggtagtcagacgcagacgattactgtaactgttaaggaaaaccaagccagtttgaacttatatcaaaaccacgcaacggtgcatacggatgggcagggaaccagtacttggcagccccaaagcaattttcagaatgccactgatagtgatggtcaaacgttagactggtcggccattgaggtcgttggaacgccagattggactacagccggggactatcggttgacgtatcaatttactgacaagactggtcagttggtgacggcaacgatgacggtaacggtggttatcgaggaggccgacgaacaggcggaatcccaaagcgatttacagattcatgattcaactattactgtcggtgagtcgtggcaaccaagcgataatttagtcttggctacggatgttaatggcggtgaattgtcgcttgctgacctagtcgtaactggcacggtcgatactaatcaagccggtgtttaccaggtgacttatcagtatacggatgcgagtggtcaagttttcactcgcgtggcaacagtcacggtcgttgcggcgagcgatggcgatacgaatactgaacagccaggcgctaccaataccaatgacgatgtgaacggcggctcgactggaagtatcgatggtgatgatcaagcagaaatacctacggatgatgctgaccagatggagggtgatgcggctgacgttgatgcaaatgcagttattgatgacgcaacacccgcggttggcacgaatcatggaaagggtgcggatcgtaattctggcatgcaaacgacggctaatggggctaaatcagtagtcacttcatggccgcatcggagccagacgtccaacacagttagttcacaacacgcgcaaactatcgttgccggtcatcatcaagaatcacggccgactgaatcagcttcggtagctgttcagcccgcaacggccaaactcggcacatcggctttaccgcaaactggtgaagcgccaagtcgtgcaaatgtgatgggaacagtgctattggggttgaccatgttcggtagttggctcggatttcggcgtgtgaaacgccattaaacaacgtgctcgaaatcgtaaggactgaataaaagtgattacggtgattgtgattttcggtatcagcgtcaggatgatgtgtcgataacagttaataaaagaaacgcttcaagaattagtcatgaattcttgaagcgtttctttgttattcactcaatcaaactagtcaggttactgaactttagcaacgagttgttcagtaaatgcatccagggcttttacatcatcagcttctggtgcaaggttaacgaacacgtccttggcaccctgagtagctccagccttctttaacgcgttactgaaatcggtgacggcacggcaataatcatcatcatagaaagtatcgccagagccggcacagccgtaaatcttaccggttaaatccaaatcctgtaagtcctcgtagaagtcgagtccctcttcagggagggcgccctcatcgtaggtgtaagggacgacaacacaaatatcaacatcgttgaattcagttgcgtcggcttgcgagatttcttctttggcaacatcgaccccaagtttttcgaatttttcagtaataatatcggcaacgtcttcgttgttaccggtaatggtagcaaaaataactttcgcagtagccatatgaactcctcgctttcaaatatcttgataagccgattatagcagagttttaaccttaatttaaggtattgggcagttattcacaaatccgcttgaccagtggtttctcagtagccaattccatgctataatttaactattaatggttattttaccgaaattgataaaaatttttggtcggcgcttaaccaggaatctaatgtaaattataaattggcgaggagcgttggttttgtctagaaaaaataaaaaagaaggattgggtagacggctctggaattcgattactgagccaattcccgacgatgatagtactgaacaagataatgaacagatccccttggcctatgatctgaaagactcggccgcatcaaaggcggacgaagccgaagcaaaatcaacggtcaatattccccgctcgacggcgaataacagtgccgaaaagcaacctgttgacgcagtaattgaaccagaaaaggtggctaaaaaagcgcgccattccggagacgatcgccaggctgcaaaacaatcgacggcacccgtcaagcatggggcgactagtgcggttaagcaaaaaggctcggctggttctcagtcgtcggcaaaggcggaatccgcgcaaataactaaaaagtccgccgcaactaaaccggcctcaacagcaagtcaggcggcgccaaagacggccagcgcggtctcatcacaggcagtaagtgaccagcgtttcaagcacgcagcttcgacgacagctagtgcggctcaatcggcaccagcgcgggccgctaaggaagcgtcacaagcaaccagcaccgcagtgtctgatcagaagcgtgtggctaaaacaacagcaagtaccaaggttcatcagtcggcggcaacgtcggaagttccaatgacgcggatggcccggcgtgctagtcaggaagctgccagtcaggccaagacgcacagtcaacagtctagtgcttcgacatcgagtgccgcggccgccgcatctgcggtagcacaatccacggccccgaagtccacagtccccaagtcagcgacatcaaaggctgctgtatctcaggccacggccacaaccgctaaggatccgcaagcgactgctgctaaacagccgaaggtcgaaaggcgcatcccagctgatcatattccaccggttgctcgtaaacagcaaccgcggattgcggtcaaggggacggaacaagcggatgatgacacgcagcctgagttaccattatcacgtgaagagttgtatggtgatcagcagcccaacggtggcaagcagcccaataagccaaccatgtcacgggtcgctcggcacgaagaacagcgggtaccacatgatgatcagccggatgacgaccgtgacttttctgagttagaaacggatgaaaagaatccacatcttaagaagccagctcggcgctataactggaagttgatgttggctggtgttgcgattctggttgttgctgctggtggagctttcttcatgtggaaccatgggcaagccactcaagctgcggcacgaaccaatgcggaaaagatcgtggaccaagtttatacatcatcaacccaacgggacttgcgggcgagtgcctcaagctcgactttgaccaagttgcaaaataatattgataatatgaaggattcaagtgaaaagacccgtttgcagaaacagcatgatacggctgctaagatgttgacggtccggactagttaccaagatttacgcaacgctaaggggttacttaagaccgacgtgaccatggacaccattactaagggtcagcagcggttgacgactgctggcttaacgagtagtaagccgtactttgctaagaagtatgacaagttgtttacgacaacgggaaaaacggttaagaaagtggtcagctatgatgctgattttcaaaaattatataacaagaaaaataaactcaaggcttcgaccccgtcaacgacagtcgataaagtacttgcaaacctgaaagcttatcgcaaaaagtcgcagttagcggccgatgattaccagaagttgattacggatcgcaagaagttggcgaaagcgaataacgcatcgtcttcaacctcaagttcgagcacgtatagctatagtgaaccagaatcatcgtcgagttcatcatattcgacttatagtgaaagtagtgacaacagtagttcggcttcaacgcatagttatagcaacgatacggacacgagctcggcaacgtcaagctcaagtacgcctagctacagttatagtgcaaacaccgatagtagctcaacgacgaattatggagatacgtcttcaacaacgaccggtggcactgcttcttctacagatggttatagtacggcaacgggcaataattaatttttgggggtaacagaccagtaaacttgatgatcgactgaaaatttaaaaaccggccagcttaattaattcagaacaagttgttaggaaaattgctacaggtgagaactatcgtattaattacataggaacagtaatttatgaagatgaataactaaaataacatacatcgcactgttttagttagggtctccggtagctagtggtgatgaagtaatgttaagaatctagcttatttgagaattgatattttcctgaattttaaacttgagttcaatctcgaattgtcaaatcaagtgtaacaccctcgagtcattcttaaatagtgggctgattaatatctgtagagccatccattgatggctgatgggcaagtgtttgccgtggccagtatttcaaagcatctttgatagtttgaattctagtgatagttaaggcttgtatgcacggactttccttatagaataaactccctgatttactatgacttatttatttggaggagcgtctggctaatgggtaaaatgaattagtcagtagaaataactggtatccgatgagaaataattgccgggtaccggttattttttaagaaaatattgaaggagtttcaagctaacccaaataattttggatttgagacaccttcagctaatagaaatcataaatatgaacaataaaaaggagaagaaaaaacaatgaaaatattaaatgtttttgatgcagtaagggatggcacgtttcaagactttaaaaatttttatgaaggaaatattaatgtgattagtggaaacttggatttgaatttattatgtatggcagttactaatgataaaaatccagaagaaaaacttcaaataataaagttcttatttgctgaaggaatagatgtgaattatgctacacaaaaagaaaaacgaaatgcacttcatttattttatttttgtgttttgcgacctactatagaatatgaaatggaaataacaaatcttttcattaaacatggagtgaatgtaaatgcgacagacaaatacaatgcaattccattgaaatatgctattacaataaataatttgccaacttcggacaataaagaaatgtatcagttgctgctgaataaaggatcagattacaatttgaaagatggatttggcaaatcatgtttagactatgcgaaagaatattcttggagaaatgattttttagatattgtaaaagagtatgaaaatagcaaaaaatgattggagattgaaaaatggcaacgattataatcattggagtagtaatcataggaattacgctgggcttaggattctggagttatttactgggaaaaaggaatcaatctaattttgttggcactatcattccaatagcttactttgtcgttcggacagttttagctgtgacgacacaaaatatgacacgtgggctagtatcgtcattagtcggtagcttgttattcagtctggtttactatggtttatttgcttgggggaagcaccggactaataagtaatatggattagtcagataaaaataaaataaccgatattcgataaggattaattgccgagtatcggttattttatagaaaagtttagacaagttgagttattagggtaggaacgacatatgttggtatttattgtgattggattgattacgggggtaatcacgattggcttgggctattggagttatgcattagggaaacgcaataagttgaatttagttggtagtgtcataccagttggtaatttggtgattaccgttgtttatgccctactgtttgttgggggacgacaacgattcaataagcaaaagcaaacaaaataggtcggctgaagatccagaatgttgatgaaattacgcgtgctggactttttagactattgcaggtattaataaaggcattatttcgtttttgacgaatctagttaggtataatgatatttataccatgattacggggaaagttgccgttaccggtaagaagtgtttatgcttagcaggtgtggcttggacatccctgaactctgtgcctgtctcaggaaagcaaagaagtgaggtagaatatatggatgttgatgagaattggtggcatgagagcgtactaaaagagttccataaaggtggtaagcctaatccagattttaatcctaaagcttctaagaatacccatatccctgtcggtaaatagagaaagagtagagaaatatgaatatagaagaaatcaattcagaaatattaaaggttaacaattatttaaaaaaatgtttatggatggattttgaatttgctagtgtggatggtggagatattgttgcagcaggtagaatagatacttcatatgatgagttttctattaacattgatttcaggaaaccttattatctgtctagtttgctgtattggaacttaaataattctaagccatttatagagttggtagcaggcaaagaaatgtggaaagtcatcgataaataccaagtagaagaaggaaattatatatttaagattaatgctgaagattttgacacagcaccaataattattgctagtaaaggtcttaaagctgaaataataaataaagatccattttaaaaacaagaatccctgagttattaaatcaagtacaatactttcaactcgttcttaatcaggattttagctgattagcccattccagatggctttggataacttgaagaccagtgatggttcaggagcgcatcgattggtccttgggtatgagtttctggttcaactgtggcttttgttagtccagtgttccacgattagtatggtataccattgtgctaatcacttatgacaagtctgaaaattcttagctattatcaaaatttgcagcttttaaatgttctggaccatatccatgatttgctggataagacagtgatgggtatggcaatggaaagggtgatgttggacctcgtaaaggtattcaaaaatagtaaaaaatgacaatgattatcattatttgagcagtcatcataggaattacgctgggattaggattatggagttattggttgagaaaaaggacccaaactaatttagtagatgtcattattccagtagcttattttgccgttcgagcaatcttagctgtgatgacacaaactgcgacacatgggctagtatcgtcattagtcggtagcttgttattcagtttgatttactatggcttatttgtttgggggaagcaccgggccgataagtaatatgaattagtcagattaaaataaccgatattcgacaagggctaattgccgagtatcggttatttcatagaaaagttgagttatgagggaggcaacaacacatgttggtattttatcgtccggttagtctttgtgcgggtacttggtgacggcatttgagaactgataactagtttagttggtaatttggtgattaccgttatctatgtcctgttgtttgtttggagacgacaacgattcaataagcaaacaaaataagtcggttgaagatccagaatgttgatgaaattacgcgttctggactttttagacgattactggtatgaaaataagggcatcatttctaacggatctagttgggtattaatgatgtttatatgaggtcaagaaaatgagtggagataaaactccaaaaagtattgaagaagagttgacgcctgctcaaaagaaaagtgtaaataataatgttgctgatcatttaacggatggagattttagtggaactagaagagactcagaagaaaatcctgttccaaaaacagacgcacccggggaatactggaactacttagatgaaatgctaaatacgtacaaatctataaagaactcaaaaagaagaatttatgaaaatatataataaattcaaggaaaaagcatctgatctatagtttgttataacagagttattatctaaaatgtcaaattaactgattccgattctcgttagtgccatattctcttggtgagtaagagatgtgcaaaatagaccgttgcgcaggtcacttgggataagtccgcaagtttggacaggttgaaggaaaaaattaaatgtggatgatgattgtggtattgaaaaatgttggaacaaagtgactgaacttttgtctcttaatgaggatattacaataaagtatttagaagattgtgatgcggacggacttatattggatcagtgaagtttttgaggatatttctgccaatttgaaaagtcaaaagtttattgattgtttaaggaaattggataaaaagtttccaggattagaaatggcacatgacattgatattgctgaaagttatttttaaaggggtatgtaaacagcataggcggactataacattaatggaaaagtatatcgagtcgcatatggggacaacggtttcgtcgtatcgtttcatccaatgtgagaataagtaatacgagaggagaaaatatgagtaatttagaaatatcaaaaaattgggaagataataatttattagaactaagtattaatgcgaaatcaaaatttgtaacaatccatcaactgtgctatgtacaagatacagatttaaaagaaattggcgagaaaattattgcatattctttcgacgctaaagaagaaatttatgtggaatttggtgaaaaagaaggaaattttacaccagcattttctttaagctttttaccggccgataattctgggcgtgtaaaaatagagattgatatggagattgacgataatcctgatagaaagcatagatgtaaattttatatttatagtgagttaggattgattgagcaatttggtagaagccttattctgctatctgaaaataaaaatgaagatatcgcattgaatgttagaaattaaaggcgatttttataatcaaattagccactaatttttctactccgggttctcaaaacaagtgtaacacgtacgttaaatagtggatcagttaataaaataaccatctatgatacctgataagtaagtgtctaccatgcgtattggttcaaaacatcttgaatggattggatttcagtaataattaagaatcgcataaattatcttttggaaataaaatcgcgaatttaccggtttggatttacgcctaatccgtgtttccaaggtgagtatgggtaggggaaataggcctcgatggtttttgggggggtagtcttttatgtattacactttaattttagattcggaaagttaagtgaggtaataatggaaaataaaatttcatttgtcgataaagttgagcttgtgtcgttgaaagaacgattgaatgatttaaattattttgttgttacagtaccaggcaaaaaagttcgcacgtttcgtcaatatctgaattttatgggtaaaaaatttaaaatgccagattatgcaggctttgctgcctattcagattggatgacagacttgagctggatacccaatcaaaaaattgcagtaataataaataaatatgattttttcatgaataaaaatcctaaattaaaaaggttcataatggacagctttgaggatgatattttacccttttgggaaaaggatgtcgttcaatttatggttggtggtaagccaaggatttttgaagtttatattgtaaaataatactttatttgagctacagctcagatagtgatcttaattacgggtagtcaggttgagcagacgttcgtatcataaaacaatcagtaatgatgggttactcgaatataatataaatagttaggtggtgtaatggctgttctaaacttaaggctatgttgttgaggatagcagttatcaaatgaatacccaactgtggcgttgccaacgatcaacgttgctaaggtgttggcaaaaaatgaacgagaattaattattttgacgcatattaaaaatcagtccgtcgtattctgccgtgataaaggcagcgaatgcgatggactgattttttgaaaccactaatttaacaagctaggatcaatctggcggtctttaaagtagtactgacggtcgtgatcattaatgtgtcgcaagatatgggcgggattccccacggcgacgacgttatcgggtaagtctttggtcacgatgctaccagcgccaacgacgacattgtcgccaatcgtaataccgggtagtacgatggcacctgcgccgaaccaacagttacggccgatatgaactggcatattgtactgataagcttgttcgcgcaatgatggcaaaatcggatggcccgcggttgcaattgtcacgttggggccgaacatcgtatagtcgccaacgtaaatatgggtatcatctaccagtgttaggttaaaattggcgtaaacccccttgccaaagtggacatggtgtccaccaaagttactgtgaaacggtggttcgatgtaacacttcgggccgatttctgcgaacatcttgctaagtagaatttggcgcttggttagttcgctgggccgagtttggttgaaatcatagagctgatcgagatagccaaattggcgtttttcaagttcagggtcgttaggtaagtagagttcgccagtatgaagacgatcgttattattggtcattaattaaacttcctttcgtggatgatggctgccggtaatcaaggctaagccacctaaaatgagcataatccaaatgagaacgttggcggtgagcgtctgtggcccaagttggccgagactgttccagaccagtggcgcaaagaaagcgctgataatggtggcaatcgtcaggtagctactcaggacgttgacttgaatggtatccaggccagtattgctagtgaagaccaaatatggcccggtgtacgagtaaataaagttgaaaaatacggcagcgccaatagccacagttgcattggatgccaaccataatactaagactgaaatagctgctccggcatagcctaaggttaaggtgaaccggtgtaaatagcggtatagatagccaaaggtgagaccagccagcaagccaccgatgttcatggctgctaaggttaagttgatagtggcagcgttaccaaaatgacgggcgctaaagtaactcggcagctttaattgaacgccccagatgagtagataggtgataaaggtgagtcctagtaacgtccactggtgccgtggtagttgtgtcttttcagtgcgtgcgtgattagtcgttgttgatggaacagtgggttccggtaccaaccacgccacgcccccagcaacaatcaccagtagcccgtatagccaaaagacggcatgccaactgagactgatcagcaggcctgctaatcctagcaatatcgcgttacctagggctgagaggcccgtctggtaacctaacagtcgggcccgtaaatcaccggtaaagctgtgggtcaacaaactgatggcatgtggtgaaaagaggccgacgcctaatcctaatccgagccgactgaccatgattacggtaaagttagtcgtgatagcgggaatcagtcccatgatggcgctgatcaagagtccactaatcacgattggccgtaatccccaccggcttgttaatcgggggttgagtaacaaagtaatcaatgcgctacagttggcgatggtgacgagccattcaatcagcgtagtcgggacggtgggaaaggcccgcttgagctggggaatgattcctgtaataacggtagtgatgcctgttacagtggagaggctaagaatactgatggtggtggtcaaccgtggctgcatggcttacgcctccaaccagtttttgatccactgtaagacgccttgttcttggtttgtgcctgtcgtggcgttggctacggctgtcacggctggttgagcattcgccatggcaacgccgcagccgacttcccggagcatttctaggtcattgcccccatcgccaaatgcagccatgtctgcgaggtcgattccgagaacctggccgagttgcgctaagccagccgccttattcatgccgggttggataatgtcgatgtcgccgtgaccactgctggttggttcggcgacacccgttagtaactcgcgtagttgcgtcacgatcgctgtggtgcgttctggtggacatgtgatggcgaacttcataatgtcatcatcaagctggtcgtaactttcaacgacggctaagtgatgataataatgtcgcatttgtgccacgtgctcaggattagtggtcgttagggtgtaggcacttttggcaccgcaaaccagtagctttaaatccgggatggtttgaatcttattcagaatcgtctggattgtgtctggctgaaaggcgttaagtgcgtaaacgtggtcggcatcgcggatataagccccattttcagcaaggtagatcatctcaggatagtccttgaagaaggacttgagttggaaatattgattgccgcttgcaatcacgaaccgtacgccccgtagttgtaattgttgataaagcagtgcaaattgagcttcatcgtaagtcatatcgtcacgcaaaaagctgccatccatatcagttgccattaatttaatcatggttaaaatctcccgtcgtttaattgatagccgtagcttaccacgaaattcagaccacgaagggacatttttagaggcaactagtatcaattcggtgatagcgggcataggcttggcgatagtcggtaggcgtcatacccttccaagatttaaaattccgattgaacgtcttactattcggaaagccgcattgcatggcaatatattcaatcttatggtcggtctctaacaggaggcgacgggcgttcatcaatcggatcagtcgtaagtatcggttaacggatagttggacgtttgcattgaattgctgattcaaagtggtcaacgaaacgtgaaattgctcggcaagggtattaccatcgatgggctcagcgtaatgttgattgatggcagtcatgaccgtatccgttaatgtcaagttagggctgaccgttgttgcagtcagaggaacggtaaacgtttgccccagagtgacaagtaactggtaaaagtagctgaggatttgtaatctcagtagatcggtcgtgggggtcgtcaacaggtcgtgaatcgtgactaattgttggcggacatcggcgtaggcttgcgggtgagttttcgatgaggccgcgccgttcaatgtcaattgccagttcgcacttgccggaatttgagtttgtaagaaatcgtcgtcaatgatgaggccgaactctacccagtcaacttcggtgggcccactagcgctgtgaaccacgcgtcgattagtagtccaaaggtcaccaggccgatattcattcgtctgtccatcggtgacgaattttaaggtcgtaccgctgacgagataatttaactcaatcccttggtgccagtgtggggcaacgttgatatcagtcaatggatcatgttcgtaatatttaaaggggaggcggggaattgtctggaccgtctcgtgtaagattttcatcactaaacctcgcttcaagattttgtaaaatcgcaccgcttcctttcaaaaatcaaccttgatggctgacgcgctatgctatattagaattatagttcgcgataagcggtggcatgacttaattgtaaccgtattcgcagttgaaaggaacgaaaacccatgacaattaaattaattgcgattgatattgatgacacgcttctggattcaaaggggcaattattaccaagtacgattgcggcagttaaggaagcccacgaccaagggattaaggtggtcttgtgtaccggccggccacttgctggggcgcaacattatttagatgcgttaggccttgctggtgatgaccagtacgtgattacgtataacggtgctgtaatcgagagcattgctggccggatcgtcgccaaacatttagtggataatacgcactatcggcaattaaccgcgtttggaaaacaacatcacgtgccctttaacgtgctcgatgcggacagtacgatctatacagctgaccgcgatgttaactgggtcacagttgtacaggcgtgggaaaacaaagctgggctgttgattcgaggccctgacgatttaccagctgattttcaaattgctaagggggtctttgtaggtgaaggcccgcaactcgatgccgtagaagcgcaagttaagacgacttttggtcgggacctgtacgtggtacgtgcggcaactaacttcttggaactgatgcatactggtgtcaacaaggggcaggcagttcaggatttagcggcagctctggaaatacaaccggacgaagtgatggcactgggagacgaacagaatgatctgccaatgtttgctttcgccggaacagctgtcgcgatgggcaatggcagtgatattgctaaggcacacgctgatcacgtgacggctactaatgatgcgaacggggtcgcagctgcgattcggcagtgggcattatcggattaactcggatgattatttttagcgaaacagttgacaagactacgcaatgagtttatgattgcaaatattaaaaataaatgagactaaacgtgatgatcaggagagtaaagtcagggtaatcttaagcgagccgctggatggtgtgaagcggtggtgagcctggctggaaagtagcctgagaactgctaatgcgacgagctggagtgttagctgggtgcccccattaacgggccaacgtatcgtcagttaacattactgtttggggaaacccgtcatcagtgttggcaattggccgtacgcgcaaaggtgacgagctgcggttcgtgacgaattaaggtggtaccacgcgttagcgtccttacaaaatcattaattgattttgtaaggacgcttttttagtctcatggcagttttgagaggatggggacaatgcgcttaacaagtagtgatggtggtttgtatcgagtgctcctactagtgattgttcaaactggttgatgagaacgacgcttaacggaggagagacgacgatgcaaataacgcgaaaattaacaatcaaacattacatcattattggatcaatgctctttgggatgttttttggggctggcaacttgattttcccaattcacttagggcagctagcgggggccaattggttgacagctggttggggattcttgctgacagggacactattgccactgttaggaattatcgccatcagtgtgacgcacagtagtgggatttatgagctagcgcggccaattggcaaacgctacgcgacgatttttatggtactgacttgtgcgactttgggccccttgttcgcgacgccgcggacagccactacgccgtttcaaattggtattgctagtcatgtgagttcggcacaggcaccgtggtatttattagcttactcattgattttcttcagtatcacttactgggcagctcgtaggcccacccggatcgtcgatacgatcggtaaattgttaaacccagcttttctgattttgctcgccttaatttttgggattgccttcagccggccgttagggaccacgaatgcgacaccgaccgcggcctaccaacacggcgcgttcttgaacggttttttgcaagggtataatacgatggatgcgttagccgccttgttgttcggaattgcagttgtcaccacgattcggggccttggtcaacgggatgccggagcgattgctaagacggccgccaagtctagtttgttgagtattagtttagaagcagtcatttatcttggtctgatctggattggcgcgacgtcgttatcgcaatttaagttgtctgcggatggtggcattgcctttggtcagattgccaatgcttttatgggcacgccgggtgcgattgttttagcaattatggcgaccttgacgtgtctgacaacggcagtgggtttggcgacgtcatttgcggaagccttgcacgctaaatttcctaaaatcagttatcgcgcttggaaccgcttggcctgtggggcctcatttctcatcgctaatattgggttggatcaaattattgcatggtcgacgccgatgctgatgttcctgtatccgttggcgattacactgattatcttagcgattgcctcaccgctatttcattgtgatccgctcgtttatcgatggacgacggcgttaactttgattccagcgttcattgatggtctaggtgctgcaccagccctgattactcggttaggatgggttcaaacgattcttgcatgggatcaacgctacttaccattagctaaactaggatttgattgggcacttcccgccattattggtctactgatcggcttgggctggcactatgcgcgccggttccagaacgcccatgcttacaagatgagccaggactaaaggtgtatgatagatggtaagacttttgatggatgggtgagcacatggattttttgggaatattttgtttgttgattttggcgacaaccctcgctgggcactttgctcaccgtgcggggattcctgccgtaattggtgagattctggtcggggtgatattagggccggcgctatttaactgggtccatttaacgactttagttcaaacgttctcagatattggggtcgtggtactgatgttcatcggtggactggaaagcaacttagcacttttacgtaagtatttacgccctgccattatcgtggctattattggagtgatttttccagtcgttattatggggcttgcgagtcgcttctttcagtttagctggtttgaatcactgtttatcggtgtcatcttttcagccacgtcggtttcgatttccgtggaggtactaaaggaatttaaagtgttggatactaaggaaggagccacgattctaggggccgcggtcgctgacgacattatcggggtgattctattgagtatcatgattgcgatgatgggtggtcagagtggtgttgcccagactaatctcggtatcgtgctcttggaacaggttggcttcttcataggggtcttcatcgtgattaagtgggttgccccgtatctgatgcgcttgagtgatcatctgttgatggctgccagtccaactattatggcgattattatttgtttagcgttggcatggttggcagaactagtgggcttgagtggtgctataggtgctttcttcgccggagtcgcaattgcacaaactgattaccaacacgtggtggacgttagtattgaaccagtgggctacacgacgtttattccattattcttcgtcagtgtgggtttaaatatgacgttcaaaggggtctggcaatcgctaccgttcatcgtggtcatgacggtgctcggtgtgttaactaagttgtgggggtgtggactgggcgcgaagttaaatgggttcagtcgccatagtaattacttagtcggtgccggtatgatctcgcgtggtgaaatggcattgataacggcgcaaattggattttcagcgcacttactatcaaacgattactattcggatattattttggtcatcattgtggtgacgatgattgcaccattcgtcttaaagaatgccattcatcgcgccggtcaggtgaccgcaacacatagcatcatagaagaacattaaccacatagattgggcggaagttaaggaccgcttggacgacgtagtatgggactacggcgtttttttgagtctggaagatttgaacgaggagtgagggtgttgcattagcatgttgacttattgtcgtggtggttgtcgactaaacggctattttcgtggtatcggtgaattattgtatgataatagctaaaaatatgacgtttgtaaaaatatcgttcgataggtcgggtgggtgttatattaagagcatagaaagcaattaatattgaattgataagcaacaaaagtaaactgattttatcgttaaatatttttaaagaatccggatttttaaatcaaattgatgaaatataaatataggaaaaggtgattaaaatgaaaaatattaataattttcaggcattgcaaaaaaatgagctttctaaagttaacggtgggatttggcaatggattgtgggcggtttaggctttcttgctggtgatgcatggtcccattcagatcaaatctcaagtggaattaaaaaacgcaagaaaaaaggttatggttactagcctttttatggttaaatacagttgttaaggtgggtgattaacctgaagaaaaatacattattcaaaggctgtgcgcttttaatttctcttttgtttgttcttttaatgtttcaggtagataaagacatgatatggctagcatatgcctttgcattgctagctatacctaggcccaggcccaaatatcctaaaagctatgacaaatggtactatatagcatttttatttttctgtcttgcatatttattagaagaaaacattttgggaaatttgggaattatagtagctgtaatttcttttagtccaactactcatccattcgctaaaaataacatcgataaaaaataacatgaacctaagtgcagcactaatgagagtttatcttcaattctttagtactgcacttcatttgacaattctagggcattattcctcgttggtgtaggtttaaatataatgttcaatgagggctggcaatcgttgccatgaggtgtgttaactaagttgtggggttgtagactggattcgaagctaaacgagttcaatcgtcatagtaattatttggtcggtgtcggtatgatctcgtgtgaggacgatgattgcgctgagagcgctatttgtcgcgctaatcggtattacgagagtgcgctacttcattattattactatgaaaaacggctccaccgtggtaactgccacagtggagccgtttaagcaaaaactgaaaaatcatattatctcatttgtcagtttgacagaaaggcatacaaattcactcgtatttataatgtgctatcgcccagcagccccatcactaatcacatagattgcaaaaactacaataagcactaccagcaagcttctcactgggtatttcttaatgatgtttattgttttattgagcattaacgtgtgccttaccttttatatttaaattaatgtgccaataattaaaacggcgtctgagatccaatggacatagatgccgctccgtaaagtattggcagatcgccatgaagcagttattggataacgcgtaataccgacgattaagggataaatccagttgaaatgataatgtggaaggtgcaaacatgcaaatacgatgcatcccaatatattgataatcggccacgcaaattttttgagcttggtttgtgataataatcgaatcaacggaattgaaatagaggccattccgacttcctcaccaactagtgatactagcagcgtgaaggctatccatactctttcaattaaaggataatctcgtccagttaaactagttgtcaatgttgtattgtgaaatgacaataaagcatgcgaattaataatagctataaccacaatcgcaatgacttccagaataaacaataaaagcacatacttcaccactatacgccactttggcgagggtaacggttgaaaaaatagttttaagttagaaaaaccatatagcattactaaactaattattccagctgtaagcattgctaaccaatcaaaataaatattaagaaaaatcgcacccatataaccagccacaaagagcactaatactagcgggtaatattttcttttgaaatcaatttctatcatctatcataatcccccgagacatcaattacagcgcgtgcaaccgattcaaacacgtgctcaacgtcatttttacggcttcggcggccaccagaaatgttattttcaggatcagcagttaatttcgccaaatttatttgaaacagttaatttaattttcataatatgcgttccttaatttaagtacatttattaagatacactacaattctaaaaaaatcatttttaaatttattaatatactattcacccgacttaacgtaattttgaaagtgagggccattaggaaaattattttaacaatgatttgaaacgattaaatagtattaagtattcataatggtgtttggattgtgcccttcatggttgtaatacttgcttatctgtatgtatgtgttttactcacttttaataatagtgtttaattgatggatgtgctttagatatattacaatataaacgaattttaacgttaaaatttcataatttgacgttaatacctaattttgcaaaactatttataactatgttaaatttacagactaaagcattttccttccgcaccaaagcgggccgcatgctcatgtaaacgcggattataagtgacatagacgcatcgagcctgataaccagtggcgtcaaatagcgccagtcggttcaactgtgccttttcaattcccgtcaatttcaatcctaaaccagtacccacaaaataatacatcacctagccgttcccttctcaatctgaaaaatcaactcatcctgtcaccgagttcaaaaacttcgagtacgcacggacgattgaccacttcatctgttatatctatacactatctttaccctaccatattttatgttactcgaccaagatatgaacagttttattgacatacaaaaatcgctagtcgtgaacaactaccgtatcagcagtgcccgactagtgatttttcaccagtttcaattaaattgctagccatacctagtgacgctcagcacgctagttattgttttcctcaaatataattaaatcaataattagtgtgtaatgaacatcccaagacaacttagatctctgagacacgcccaccatgaactaaaacaccgtcatttcttaacatttttcaaagcttgacggaatccgaaacactgagagcccgtgccaccgtcgcaatatccttcggcgttgtgcgacaacagccgccgataatgcgggccccggcggctaaccactgggggacaaaggatgcaaattgatgactcatatgagttgcttgccaagtcttcgtcacgggatcatattgatcaccagaattaggataaccgatcaacggaaccgctacagccgccttcaaagtggttaacgctggtgcaatgttttccagcgtagtgcaattgacccccacagcgaccacgttcggctgggccgccacccactttgcggccacagctaatgacgtcccatcacataatgtctgtggatccttgatactaaagcttacccagtatggttgttgcggccaagtggttgtgattagttgtaccaaagcctgtacttcgtctaaacgtggcatcgtttctaatgcaagcacgtccaccccggcggccgtgatcaacgccaggcgttcgcggtgaaagtcttgataggcactcggcgttaactgatatgcacccgtgtactcactaccatccgctaagtaagcaccgtacgggccaatactaccagcaatcacagcatccgtgacatgactagcatcacacgccgtatgagcaattgtcaccgcctgttgtatcaattgacgcgcttgtgcggcagcaataccagcctgctcaaatgcagggacgttggcctggtatgtattagttgtcatgatttttgcgcccgcatccagatagctctgatggaccgcttgaatcgcatccggatggtccaacattgccgtggctgaccacagtgcgctattggttgccacgccccgtttttctaattccgtagccatcgcaccgtccgagacgaccgggccccggttcaattgttcagttaatgaaagcattgcaataattgccttcctttctacttataaattatgttattctaatagcattgttgattttctaatcatagtctaatcatattaattctgcaagtaaggaaggccggtacattatgtcaaaacaaacccacctcagtcgccagatggaatcacggcacgtgctgatgatttcacttggtggcgtgattgggaccggattatttttaagttccggttacacgattcatcaagcggggccaattggaactctgctcgcctataccattggagccatcctcgtctatctcgtcatgctctgtctaggtgagctgtcagttgcaatgccctacaccggggcgtttcacgtctatgcgaaaaaatatattggtcccggcacaggctttacggttgccatcctatattggttgacttggacgattgccctcggttcagaatttacagcagcggggctcatcatgcaaacgtggtttccgcacattgcgacctggatctggagcctcgtctttatggtggtcatcttcaccgttaacgccctctccgtacgctggtttgcggaagcggaattctggtttgccagtatcaaagtcatcgcgatcattgcttttattgtgttaggcggactggcaatggtcggtatcctgccacttcacggtcataccagtgccccgtttctgagcaactatacgcgtaacggttggttccccaatggttttggtggcgtctttacaactatgctaacggtcaactttgccttttctggaactgagctaattggaattacagctggtgagactaaggatccggcccacaccattccgaccgcaatcaaaacgaccctctggcgcctgattattttcttcatcggtagcatgttcgtcatggccgcactgattccttacaaacaagcaggtgtgacgcaaagtccattcgtgctcgtcttcaaagcgattgggattccctacgccgctgatttaatgaatttcgtcgtattgaccgccattatgtcggccgctaattctggcctctacgcgtctacccgcatgctgtggtcacttgcaaacgagggaaccattccaaaggttttcaaacgaaccacgaagcgcgatgtgccgttagtcgccctaattactagcatgctgggtggcattctggccctattgtcgagtgtctatgccgccggttcggtgtacctggtcttagtatccatttcaggacttgccgtcgtcattgtttggatggcaattgccctttcggagatcaacttccgcaaagcctacctgaaaagtgggcagtcgcttgatcaattgacctttaaaacgcccggctacccggtcgtcccgtggctggcctttatcttaagtgggctctcttgtatcttgatttggtttgaccctaaccagcggattgccttgtattacaccattcccttcgtggcgatttgctatctaggctactatctcaatcaacgttatcgacggacccacgccgcaaagtaagcccattagtcagctcaactcaccaagtccacccagtaatcgccttttgatgttgacgacctaaaaacgaacatggtcatggcttttgctggcatttctgaatctacttttaaagtacgatccagccgacgacaccgatttttgaactgcaacaaaaccaaatatcaatttcagatctcttgctagcccggccagttgctagcaagagattttatttatttcagcagtaaattgattatcactagataatcgaataaataaaccattaaccccgtatacaagctgacgattatgctatgattaatttatcaagagcattggaggggtttctatgcacccaggattattactcgtcaatttaggctccccagcatccccacggactaaggatgtcaaaacatacttacaagaattcttaagtgatccaagcgtcatcgagatgccagccgcactctggcaaccgctgttgcgtggtattatcttaccgacccgttcttggcgttcggccaccttttatcaggatagttggctcccacaaggctcaccattaatcgtctacagtcaagccatctgccaacaagtacaagcagcattacccgattgggacgtccgactagcaatgacgtacggtcaacccgatatcggtgcgaccttgaaagccatggttgctgatgggtgtgaaaagccaattattttaccactttttccgcaatacacccagagcacgcacggcggcatccatcgtcaagttgaagcaactggattaccacacatctttatcgacagtttctacgaccaaccgacctatattcacttactagcaaccaaagtctggcaaagctatcaggcgcatcattacgatgcggtcatcttcagctaccacagcattcccactgcaatggtccgccatggtgatccctatcaacgcgaatgcgaggcaacgaccaaagctgtgttggcggagcgaccagaattaccagctgataaggtcattacggcgtatcagtccaagttcggaccgatgccgtggttgaagccttacttaaaaaatgagctcatgcagttggtcgaacttggcaaacgcaacatattagtagttacgccatcctttgtcgtggactgcttggaaaccctcgaggaagactacgttcaaaattatcaaacctttcgggcaagcggtggtgatcggtttgacttagtaccaccgatgaataaggataccggcttcagccaatttctggctgacctcgctatccaaaagcaggaggcgtcgaaccatgcaatcgcatcgtcatcaaagtcttgaagaaatcaatcagagcgtcgcggttcccgacgttcatcagacggccttttggcgcaaatttttagcctatagcggtcccggtgcactagtggcagtcggctatatggatcccggcaactggttgacatccctagccggtggcggtcagtttcagtaccggcttttagccgtgctcgcattagccatcattgtcgccatgttcatgcaaggcctggcaatcaggctaggcgttgtagcccggcaagacttagcacaagccatcgctagcaagctgccccggcccgtgcgttacgccgcgtggattttaaacgaagtcgcgatgatggcgactgatatgacgggcgtaattggaaccgcaatcgccttaaaaatgttattcggcttaccactacttgcaggaattttactgacgattgcggacgtcttagttgtcttgttgtttttgagatttggcattcggcgtgtcgaagtaatcgtcctcgtcgctattttgaccgtcggcattatttttggtatcgaggtgggacgggcccacgttcaatttggcaacgtgttgctcggcttagttccaacaccattgatcgtcaaaaatcataccgcactagtcctcagtctcggaatcttgggcgcaaccatcatgccacataacttatacttacactcatcgcttgcacaaagccggcgttatgattatcataatccagcccaagtcacagaagcactgcgcttcgccaattgggactcaacagtgcacttgattgcggcttttctcatcaacgcacttttgctcgtccttggtgggacgcttttcttcggtcacaccaacgcgttagcgagtctgcaggccgtcttcgatgggttaaaaagtaccaccgtggttggcgcccttgctagcccggtcatgagctggttatttgcattagccctactaattaccggcctaatttcatccatcactagcaccttagctggtcagatcgtcatggaaggttatttacacatccgcttaccgctatggcaacgccggctgcttactcgcgctgtcacgctaattccgattctgattatcggtatgttagtcggctttagtgacactgcctttgaaaacttgatcatttacgcgcaagtggcactcagcatcgccctcccctttaccttgttgccactagttgcgctgacaaatgacgccagcctgatgaaggcccacgttaatcgcccggcggtaacgtgggtgggatatggactggccggaattattacggtgttgaatatttatttggtgtatagcttgttttgagattatgcaatatattggcaatctaatccccgttatttcaataaggaccccattctgatagattcaaaatgaggtccttatcttttactttgctaaaaactgacagaacttttgaagaagacagttgcacaaacaatgccagtcagtcatattcagcgattcagcagtcccgctaaagcaccaatcatgttggcctgattatgaaacttagcaggcacaatctctggctttgataaagtcgttccaattacaggatactgttgcagcagcgccgcatactgtttacggatcatgggcacaacactcggttgagcactgatgccaccaccgattgcgacggtcattacatccagtactgcttgaacgtttaagataatttgtgcgacctccataccataagcttcaaagatgcgttcagcatccgggttgccgtcagctatcgcggcaaacacctgatgaccatcatgtcgatcaggtaactgtaattggtgcgcaattgccgtaatcattttcactgcagaacccgtctcacccgttattttgaaattagttccagtcgttgcggctaacatcagactcaactcaccagcttgaaaatgactacctcgatagagctgattattaatgattaagccaccaccaaccccagttccaagcactaagactaaaccattttggcaatattgtaatgttccgcgccatttttcggctaaagccgccgccttaccatcattttcaaccgctactggaacctgataatggttttccaaagattcctgtaagttgcattgatccaggtatggtagtgcgccgccatggtgaatgataccgcgttgggggtctacttgacccggaacgctgattgccattcccgcaaagcgcccttgaaagcggtcgatagttgctgttaactggtgccaaaaatcatgcttatttttggcaattggcactgcatcaagtgactgctgcaattgaccattcgcatctatcagtcccgacttgaggctagtaccaccaatatcaagacataaataattattaatcatgcgtaccacccgtaatgttagcctgcgcttgatgaacatgtagataatgtccgagcgcataggcagctataagtagaaaggcaacgccactcaacatcataactccccggggcgtgccatgaccaactatattagccagcacatccataatggttggtgagacaaagcaaccaatattgaccaacactaacacaatcgtcgttgccaagttcaaggatgattccggggccgcccagtccaaccaattgtataagtatgggacaccgataccaaaaccaaagcccagaatcacaaccgcaacgaataaaaaaacaatattagttgcaactgcaatcagaatgaagcccacagcaactagcaaaaaacccaacgggaaaatacgatcatgtaatcgtttaaagaagaagccaaaactagcgcccactggaatactgaccaatgttgataatccagcaatcaaggcagccgtactactggtccccataccgtttgcgacgatcaagcttggtaattcataagaaaacggcatgtagaacataaagactaaaaacatcaacactgcaattaccacgactggcatattgatttttcgtgtgactgtcgctgcctttttggattggctagctgcctgtataactggccgtggtaacggcacaaacaatgtaaataaaatcaacgcgggaataacgagtaggtaaatggcaaaggcggcatgccaactgatcgttactaaataactaactaagaatgaggcaatggcggccccaacacttcccatcacgttctgatagccaatcatttgcgccaactcattttcatcacgcttatagaattgtggaatcaaactaacagccagtgagttgaatagcccaatcccagcaccgattagaaaacgggaaactaagattgcactgtaggccgtggcgtacattggaaaggtccctgccaatagggtgacaaccaggccaataacaatggttagtttttcatgacaccagcggaccatcaacggactgacaagcagccccgccacaattccaaaattaggaatcgttgcaagcgtctgaacaccggcctgttgaattcccgggaaagcatggtacatcaacggtagcgccgaagaaatttgcggcgccatcatcaaaaataatgaaattgataataatgaaactttaaacaataaatgattttgtttgtccttcatcatattttcctccagattagatcaggccatatgttcctgcaaaaagcgcatttcatcatccgtcgcttgttgtgctaattcatccttttgactaatcagaaaaacatgcccgcgaggatgatcgtcatcaccatacattttaaaaacgtgttcaactttcttggcagttaagaatccatcgagcttagccgcgttattacgcaaaaagtccgctgtcgccgtacaaatgaatgttggcagataatttttctgaatgtagttttctgccataatctgttctcgttgttgacggatgatgctgggagtaaagtatgcagcaactgcacctgtcaccatgccttcgtctagcggaaatgccgccgcactattgagcacgactgcgcgaaatttcagattagttagctcgtaaccaaacttggaccgatattccggattagtcagaatcgttgcatactgctcggccatctcaccacctgcactgtcaccaatcaagaaaacattattactgtctaggttatattcggctgcatgttccgctacccaatgaatataacgatctacatcatccaattcacctggaaaagtcacatctggggccaaacgatagttagggttaacgaaggcaaatcctcgttgggcccaattcagaccataaaattgataagtttctttagtgccataacaccatccaccaccgtgaatattgataatcacaggcaatggtttaatgaccttagtaggccgatataaatccaacaaatgccacttggggtcaggaccataacttagattatctaatctctcgacaccagccatttcacgaggtaacccagcgtcacgcgcatcatcatttttcttaaatgcggttcgcaattcaattattgaccgactcaattcttttgatatcattgtaagcgcctccatttattggctctatcataaaaaaactactagccgattaatatagcaatatcaaccagttagtagcagaatctaaacctctttcagaacatcgtccataaacagttagtctaatgtatgttcagttttgtaaattgtcgctgcagtttgatgatacaccgcttgaaaagcatgatttagggcacgcgtacttggaaaaccgttcatcgtcgcaattgcggtcaaatttccacgctgacctagcagatcttcataggcatgttgggcacgcaccaaactaatatattctcctaccgtcatctccatatgttgcttaaaaaagcgcgtcaaatattccttggtcacattaatctgttgcgcgatgtctgataagctaattggctgtgtataatgttgattgacgtacatggtaattttttgaattcgctcaacaatctgaggtgctttcccataaatcacaccagaacttgccttagccgtcgtaaaatagatcaataagcgttggaggattgcagttgttagcgcctcaattcgtaggttcgtatacgcagttgactgttgtaacgcgagtgctagttgatataaatctccctgtaaatctaggtataccgccgactgctgctctgaaaaatacgctggttcgttaatcgcgattacttcatgctcaatggacggataaagtcgatgcacataatcgtacggatagattattgataacgcacaactatttgctgtattgatcgttcgaacgctatgaattagttgtgaattcacaactaatattgaccctgatttagactgataatctcgaccattgattgtaaaatcgtcaatgtgaccactgagcgtatacgaaagttcgataccttgatgccagtgtggcgcaattcgctgtggcgccttagaatcgtgcaagtgaacccaagctgataagggctgtgtacgcgtgactatttcatgttgaaatcttgttgacaagtacgctacctccttagcgattagtgctggcacccattcatccgtttaacatgctattattcaaatacctagaacttgcaaaaataaacatctgaattgacaattattaaccagacacttaataacactatggtaaaataaaaaccgtgattatcgcaaggataaccacggcacgaaacgaattggcttgaatatacgtgctatatattacttcgtttcatacccattataacagataaaagttacgatggcttttcatagtggttacattcataaatttttaaaacccacgtttaccagaataaaacatctcaccagagtttagattacatagtagaaaggaagcatctcaacatggtaaaaattgcagtcctatctgacgttcacggtaacgctactgcactcgaagcagtcttagcagacgcccagaaacaacacgttgacgaatactggacagtaggcgacatgaccgttcgcgggccagaatcggagcgctgtctcaccttactagaccgcgttcaccccaccgcctacgttctcggaaatcacgaggaaaactaccaaaaagtaatggcagccaatcccaacacgtttactaaacccaaacaaattatggcaacggttctcaccgcttttgatcggcgccagctgagttcgacacactttgaacggttactgaacttaccaatgacagtcatcaaacacgtcggcccgttaaccatccgtctccaacacgttttaccgaccgtcgctagtggacacgcgctcgcaccaactgccagtcaggccaactttgaccaagccgctgaaggcgatgtcgatatcgtcatctacgcgcacacacaccagcccatcatgcgctacgcaaccacgggacagttgattctaaacgccgggacagttggtcttccgactgccattaatccccacctacgccaaccacgagcaaactacttgcttctgacaattgatgagactggcctccagcatgttgattaccgcgccgtagatttcgattggcagcgtgctatcacgattgcgcaaaatacccacttaccctacttcgaattctatgaacaaactttgcggactaatacttaccaatatgcaccgagtgcggtcgctgcttataatacgcaacatgacatggcccgagaagcgcgcaagattttacttgaaaatcgtcactgaaaatctcctaagaatcggtagaaaatagtttcatttttctaaaaattctgtatacttttaaaagtcgattactgcttcggcagtcaatcgctgttcaagagaggagctagaattatgtactttaaaaaagcgaccctcgatgatctcgatacgatcatcgacattctgagtgacggccgtaatcaacttgctgaagctggggtcaaccagtggcaaggcgactacccgtctcgcaaacaaatcacggccgacatcatgcaaggatcagcatacttattcaatgccgacgacaacgcaacggtcggcgctgtcgctgtcgtgccttcaccagacgaaacttacgatactgcgaaggccgaatggttaaataccacggcaccttacgtcgtgattcaccgagtcgcgattcattctagccatgcaggtcatggttatgccactcaattattcgaaaaaatcattgctcatattgctgcggatcatcctgaaatcaagagcatccgtatcgatactcatgccgacaatcaagcgatgcaacatctgattgcaaagatgaacttcaagcgagttggcgaaatggtcggtgtataccatgtcgatgacgtttgctacgtctatgaaaaaatgctctaattaatctgagaacctgaccacttgtggcaggttctttttttacgatcaaatccaatcagtcatgctaaatgactactcgtttgcggcagttgtcacagctaagtccttttgctcagcaaatacacaacgagtggctgtttgattcttataaccggcgcactagttgcagcccgattaagacaagcttggcttcatttttgtaacaaagtcgccagtgctgcataccgtttgcgccagtccaaaatagttagcgactcacagggttgcgttaatagccaatccaactgtgcttgccggtcaggctgatctaagaagacgtaactccgcggcgtaacaaagttttcaaactgacgacgtaactgtgccaacggaatgttaggtaaggttgtaaaagccgtaatcggtaacgccaatccgactttagcgccttcaaaataagccgcggtggttgtgggcgcgttatgctgtaacaatgcgcccacaagcgctaattgttcaggcacgagttgcatgccctgatcacaacgcaaaaagagttgaattcccccattagcccctgtcgtatagacaaatgcttgaaacggacgtgcaaaaaaacgccgacgatattccagaatcttggtgccattgataatcgcttgtgttggttctggatgcaacgaaaataataatgttggccgctttggcaagtaataatctttaatcgttggcatggtgccacccctccttcactaattagcactaagtataccccatttgcgagcgtgcgccaactaatcgtgatttgcaaaaacacgaactataaatagttaacaaacaatattattctgattttatcctaaatttactggattcaaaccctaatcagtcgtatattattcgtataaacaaaaaaggcggtattaatatgcattggttggcggatctattggcagcaatcggggtcgttttaaacgggatcccacaaggaattatggcgatgagtctcggttttgcggtctttccgactgcattttcattcggattagttggtttaatcaacggcgtggctagttcagttgcaccggtttcatttcaagcggaatccctcgcactagtcgggcacctgggacacgatttacgcgaacggtcgtcgattatctttttaggtgcgagtatgatgttcgtgattggcttgaccggtactctgccgctcatcgttcatagtctgggcaatcagcttatggcagcgatgatggcaggagttggcctgatgttggctaaaatcgcgttgcaaatggcgcacgaacaaccccaatttgggtggctgtcaatcggcttggcgggtgtgacttatttgatcagtaaagatttagtatggacaattgccgtatcagtgattggaaccagctgttacgcagcgacgacacattatcgcgtcgcactaccggaacacgtgacgacccgcaaattacaatttgtcagaccacagttcagttttaaaatcctgcgaggtgctctgagtctagcttgtcttaatatcggtgctaacctctcgtacggcttaattactggccaaatgacgggacaacaccccaacccggtcaatctaaatctactgactagtagccaggcattagcagacctgggaactagccttctgggtggtgcgccagtagaaacgattatttccgcgacagccagcgcgcctgaaccagtaatcgcgggtatcctaatgatgttgatcatgatgctgattctattactgggatggctgccaaagctgggaaaagttgtgcctagcactgcaatcgccggttttttgtttatcttagggaccattgtcattttcccggaaaatgcaaccaccgctttgcacggctcgtcaagtacggttgcaggcgtaacgctcgtcgtgaccgcccttgtcgatccattcgcggggctaatgaccggggcactcctaaaatttggtttaccattaattggattggggttataaatatgcaaacttatcagttaacattaggatcgctgacacggcagttaccattgattcgattaaatgccacgactagcatcgcctctttcgttctattgggcgacgctgagctgaccgactatgctgcccgtcagctcagtcaacggctaactaccactaaatttgattatttagtcacgatggaaagtaagggcattccgctagcccaggcactaagccaggccacaaaccaccctcgctttatcgttttacgtaagaatcgtaaggattacatgcagcacccgcttatcgaaccggtaagcgcaattacgaccagcaccccacaacagctagttttagacggtactgacgccgcactaatcaatcataagcgcgttatcattatcgacgacgtcattagcagtgggggttcgttgacagctgccaacgccctcctacaccaagctggcgcccaagtggtcaagcagatagcaattttagcagaaggcgccgccagcgaacgaacagatatcgattttttggcaccgttaccgttatttgactagctgcgattcagaaacacattacaactcactagcgagtcacaaagcagaacaagcaccatggacttaaaccaactatttcagttatcaccgagtgcaacgagcaagttttagatgaattgattcattttaaagacctaccataatatgaaaagccctatgttagcatgatttatgctaatacagggcttttcgatgcttacgagactatttctacgttcatattcatgcaatgctaatattgtaaatttattctttgcaattggaaagttcacccaaaaatcattttgcctattttcgcatgattctaagaatacaaaaaagccgttatatcaacgatataacgacttcttaaaggtacttagagcttcctgaaaacctcttagtaccggcgatcggggtcgaaccgatactccctcaacgggaactggattttgagtccagcgcgtctgccaattccgccacgccggcaaaataataactagatggaacataaatctgatcaggattataaccttttcaggaaaggcggtaaccggatttgaaccggtgatgaaggttttgcagacctctgccttaccacttggctataccgccatcatttattgcccaaacccaactgggttagctggattcgaaccagcgcatgatggagtcaaagtccattgccttaccacttggctataacccaatcaaagggcggtaggtgggaatcgaacccacgcgtgccggagccacaatccggtgcgttaaccacttcgccactaccgccatcatggcagggatagtaggagttgaacccacaccgacggttttggagaccgttgttctaccattaaactatatccctataaagaatggaggggagtggattcgaaccaccgaacccgaaggagcggatttacagtccgccgcgtttagccagacttcgctacccctccataaatggcgcgggacggaatcgaaccgccgacacatggagcttcaatccattgctctaccgactgagctaccgagccatatcattcttcatgatggagtctattaaattattgatgagtaactctcatcagatggaggatacagggctcgaacctgtgaccctctgcttgtaaggcagacgctctcccaactgagctaatcctccataatgacccctacgggattcgaacccatgttactgccgtgaaagggcagtgtcttaaaccacttgaccaaggggtcatatttattatatctaactaacggagagtaagggattcgaacccttgaaacaggtataacccgtttacagcatttccaatgctgctccttcagccactcggacaactctccatggcttaccgtagatagctggcttcacaatatgcggctatcttcttagatgccacttacttgccgttaaagcgggataccgttcaaaaagaagccgttcatattgcgattggcattcgtccagatggtacgaaagaagtgctgaactaccaagtggcgccaacggaatcgactggaatctggactgaactgctgggaaccttgatcaagcagggcgttaaagatgtgctgttgtttgtggccgatgggttagttggtttggatgaaggcttaaatcggcattttcccaaagctaaacgacaacgttgcctggttcatgttgggcgtaatttgataaacaaagttcgggtgaaagaccgtaaggccgtgatcaatgactttaaacaagttcattgggctgccaatcgtgaagcagccgaactgaaactgaatgagttcgccaacaactggcatcgtacctatcccaagttaatcaaagatctgcttaaaatgccgaatctgctcactttcatggactttccaccagccattcggcaatcactctactccactaacttgattgagaactttaacaagcatctcaagcgcaccacccaccacaaagaacaatttccaacggaagattcactggatcgattcctggtttctcagtttaatgcttataacgagaagtctctgaagcggatccaccgaggctttaaaggactccaggacaccttggaagcatcatttatttaagttagttacatattacatgtacgaaggcatttcatttacacaagattcttgacgctacccaatatttacaacaagctcatgcaaactaatctgctatatattttgtgaatcatttaaagattttactgccttaatttgtttactacgtaataactttttgggaataaaaatagcaattaaaggttttactacatatggcaaagctttaggaagagcacctaattttttaaaattacgatagcgataatacatttcacctaatcgatttcgccacctgatttttttaatataattattgtcttgataataataagttaaatttttttgaatattatacccttgcagcccaacagcatacattctaaggtacatatcgtaatcttgtcctctggctgtttcccaagacactctgtacccagaaaccatctcaagtgcttctcttctaaacatcatactaggattaaaaaattgactggttttcagtaaatctttaactgtagggttttctggttttgttagtctaccgtaaacaccctcagcattaaaaacagctacgtttgagccaacaaaatcaatttttggatgactttcaagaaaatctatttgttgttgcattcttgttggatcacaataatcatcatcatctaattgcatgataaattttccctgagcctttgagatagcaacatttctggtgtaagcacttttggaattacgctcattttcaaaagcaaaaattcttctatcttgagctgcgatactctttagtattgcatacgtattatctttcgagacgtcatcaacaagaattatttcaaaatcttgttcagtttgttgcaaaactgaatcaacagttctttcgatcgtttctttcgcgttatatgttggtataataacactgacttttggcatttattaagctcctttaatccatgtttaattcaaaaaactactaaaaggtataactccatcaatacctttatataattggtacaccattggcactaatgtaattaatagaacgactgctaaagtcaaattaatataatttgttttctttattacagacatttttgctatcttaaaaaagttaataatgacttctgggatataaataatcataagtattgaaaaataaaattcaattctagtcattaacacatcttttgaaaaaattaaacctaaaattactgtaaccaaaattactgcgttatagaaggcaacccgttttacagtatcttttgtgagtcttctttgaattaaaaagccaataatcaagaagcatgcataaaacatggttaaataaattttgttgccttgaccttggacagcaaaactctgagagccatactctgtatctgtataaaaagcataactagggaatattttaataaataaattcaaaagattttttgttaccacgggtaaaatcgacacaattatagctaaaataaaatatttaattttattccactttattttataaagtacataaataaatatgccgacaacggccgtactgtgaacaagacatgccattaaatagtaaacaaaaaatgtaacatccttatccttcagtaagaatgtgataccaatccacagaataactagtgctatatattggcgactaatatttaaactatgaaagtaaaaataaagcgacacaaacaaaaatgatgatacaaatacattcgaagacatccgcttaattattaaacaaataccaaatattataattaaagaattgaagattataatagtattcggactggcattaattttaaatactagtgcactatacaaatcatatagaggaaacttactattagctagagtatccagatctatttgtccctgcattctactaaacagtagtgtatataacttagtatcaacccctacgaactgacttctcaacatggctatcgatccaaacaccaaaaagaaaggtactaaatagactgttctaggaataatattagcaatatttccatatagtttgataataaacgccatcaatatgtataataaaaaagctaataaatagatctccatgcacttttaccttcctcttatttatttgatggtattaatcatctcattataaatattgagtaatttggaaccagccgtatcaatatcataccctgaattaattaattcatcataaggctggcttcgatctaaaaatatctttgatgatttaatatcaagaatcttttttatccaaatttcatctgtatcttttagactaataaaagtacacttattagatacttgaacttcatttggaacattatctgagcaaataacatgaagtccagcagcttgtgcttcaatgcataccatgcctaatccctcataatatgaagggaataaaaaacaatccatcgcttgataaatattctctggtttttctacgtaaggtacaaatacaatcttatttgctaaatcaagatctttggcaaggtttaataagtctgttttcaaaggtccctcaccaacaataagtaattttgcttcgggtattcgttgaataattttgttgaataaagttaaaacgtatttttgattcttttgccaaaccattcgaccaatatttccaatcacaaaattttccgaagagattcctaatttcttccgcatactaattcgttgtgcagtattatattcaaattttttaatatctatagcatcttttaatacaataagattttgttcactttttttcttaccaaataaccatttacctgtatcaaatgtagggctcatatagtgagttggataaattgttgatagtggccgtaaagcatctttaatccaattctttcgccattctttaggtgcacctgtactatggttgtgcgcaatacgaataggaattccacatttttttgctattctaagcggaaagatacttaatgtgttaatttgtgaatgtacaattttataattatttgttttaaacaatttagttaaatcgcgatcatattcacgtaattgttgatatggggccacttgatagatataaccacccaactcagctatttctttttccggcacaatagttgaatctttatcaataataaaatcaaattgcactttagaatgatcaatgtgtttataataattcataatgactgattcaacgccaccacccatcattttccccattatcatcgcaattctcattggctcattacccatttattactctccttaaagcttaaaaattaagacctgtatttttaatatgcactatttggatgtataatgatgacgattgttttaacaataattttaaaatcagtccataaagacatattttgattataatgcaaatccaagtcgaccatctcagcaaaactaacattatttctgcctgatacttgccacggtccagtacaacctggcttaacaatcaaacgttgcatatcatacttagaataaacgacaacctctctttcaagtggtggcctaggtccaactaaacgcatatcaccttttagtacattaataagttgtggtaactcatcaatactggttttacgaataaatttaccgattcttgttacgcgcgggtcatcacgcattttaaacattgctccttcaatctcgttatatttcaagagctctgataacagagtatctgcattcatttgcattgatctaaatttatacattcgaaaaggttgaccttctttaccaattcgaagttgtgaatagaatactgttcctttaggttcttctctttttatttccaaagcaactaaaaagaaaaccggagataatacaataagaccacacatactacctataatgtcaattatccgtgttaaaaaacgataaatatactttctacttactttatccttatctattgttatcccactattaatagatatatcctttttatttgacactttcttttactccttacaatcaaaaaacaattgaacatattaagaatattatgtaaattcaataatcatcacaaatatctaatctccagcatattttttaaatttctttatatgcaataacgtcactaacaaggaatttagacatattattaatttcaatagccataaccgtatccatcattcttactgtctttgactcgctccacaactcctaaaatctttgtatctcccaatttcaatatttcaacagttctttttagtgatgccttcattgttttacccagcatcgtaactagaacaacaccatctattaatggcaacaaaacttgtgcatcagatactgccataataggtggtacatctagaaccacaatgtcataattattccgcatccattcaatcaataatgccattcgttttgagtttagcaattcagctgggttaggcggtatcggaccagctgtcagtacttctaggttatcaacaaaagttttttgtaccacttctttaggttgtccggctgatgccaaaattgtacttaacccattcttatttgaaagtttaaaggttgattgtgctgtagaacgtcgcatatctgcatcaacatataaaacattcttacctgcttgtgcccacgtcactgctgtatttgtcgaaactgttgttttcccatcagacatttctgctgaggtaaacataataatttgtaatttatctaatgaggcaccggaaaattcaatattagtccgtaatgttctaacttgttccgaaacaacatttttgggttcaacaactgtaactaactctgcgccttcatcttgtgtttttgtatgtttgttaacatcttttttcttaaacaaccgcataacaacctctttatttaaattcgacgattacttcgtgactgacttaattcttcatttcttgatgtattgtcacctatcttatcaaggtctttaatttttccaataaaattaacttgccctaaattagttaattccaactcatccgttaagtaactaatttcttttattgtacgatcagtcaattctttaataagcccccaagcaaacccaatcaacattccaaaaactaaaccagctaaagtaattaacttaacattgggtgctactggtttcttattatccaatgcttttgaaacaattgaaacattagacacactcataatcgaagaaaccttttgcttaaaaaccttggcaatttcattcgcggcatcacgtgccaattgactgttctttgaagtaacctccactgtaaatatttgtgagttttgctgattagaaatagaaatatttttagataactcttcagtggtaatttctgattccgtataccttggatcaactgttctaagacagccaatgtttacgttgcttacgtggtacttcaattcttctagctttaattttatcgccgttcaacaaattccgagcgttggttgcaaaacgttcaggatattggtaatccatttcatttaatacttgataagccttggtcatagcaaagccccgatttttcagcgtatgcgcatctgaggcgaccacctgaaccaaaccacatttaacgaattcttttgcggttcgtcgaacttgttccccaaaagtaccaactaaactcgtagccgtaacctgggccaagcacccattctcagccaatttgtatagtcgttgcggttcggcaataatttgagcattccgttcagggtgtgcaatgaccggggtaatcccctcacaagacaattgaaaaaccatctcatccaagtaacttggtaccatctcgtgaggaagttctaatagcaaatagtgtctactggtatctatacccagtaaatcatcaatattttccatcaactgaccatttagatgtacctcttgaccaggaaaaatagttaacggaatatcatttgcatctagctcctcttgaaatgccttaaccgccgtagccacatcaccagcatgattgagatagtgccgatccatatgatgtggtgtcgctaaaatatagcgaatcccgtcagccaccgcctgccgtgctaattccaatgacgcttctaaggaaggcgaaccatcatcaatggctggtaagatgtgacaatgtaagtcaactaaattatttatcttcatcactgtagtacccataaccgctactatagccataataaccatggtgtgaaccatcgcgaacatcattcagtaccgcgcccagaatattagcttgcgattttttcaacgaattaaccgcatcacgaaccgctgctttttgcgccacgccctgacgaaccactaaaactgtgccatcgactttattagccagtaattgtgaatcagtaacaggcaagattggtgctgcatcaacgattactagatctaacttgcgagttgccgaagttaagaattccgtcattttgttgcttcctaacagttccgcgggattcggtggcttaggaccactcgtcatcacaaataagttaccaataacgggatggattgcatcattcacattgtccatttgattagccaaccatgaacttaatcccttatgattttcaagcccgaacgtcttgtgaatcgctggtcgccgtaaatcagcatcgaccaataaaacttgcatcccttccttagcatattccaccgccaagttacaacttactgttgacttaccttcaccaggcatcgctgaagtcaccattaaagttcgtaaatttttgtcagtagccgcaaaattgatattggttcgaattgttttaatctgctcagtaatgaccgacgtgggttcattaatcgtcgtgagattaattggtgccgtagtcgttatattctgtcctttacgtttaaacatctagcaccctcctaaactcgcttcatcgtttgcgatgttatttgattatcatgtgtgggatgagcaacagtcaaatttgaaacttgctttttaattgagtattgattttgatgattgactaagcctaaactagctaaccctaaatcatcagttaagaaatccatagcacgaacccgacggtcagttaacattcgaagcaaagcgtaaacaaatcctagtaacaatcctgcaactaacccaaccaacatattaagaggctttttcggtgataccgcaccatttggcgtttcggctggagcaacaatcgtgacgttgttaactttaataattttttgcacttggttctcaaaactacgagcaacttgatttgcaatcgtcgcactagcctttgcatcactgtcagtcactgaaattgaaaaaacctgtgaattggttgtatttgtcacactcacttcccttttcaatgtgtccaatgagcgctcaatgccataacgcttgcttaattgttgcttagctggttttaaagctacttgtccagcaattaattccctgtaggtcgtaatcatctgaatatcagcctgctgcccagcatactcagtagcggcattagtattcttacggttaaccaaaatctgaacactcgattggtacttaggtgtaattacaaaaaaggtcaatcctgcggcaactatcaatcccaccaccgtgaaactgacgattgcacgccagcacttacggacaagccggataaaaaagtcaaaactaactgtttgatccatcattcactctccaaaattaacaagattaaaacacgttttaactaacgctattaaatacaatctatcattaaatataacatcgcattggttgatttacaattgaagtccaagaaacgatctcacctattgactgcaattcaagatttttcatttaccttttgataaagggttccatgatagtctctatcatgctttttatcggccaaatggtcaatcaattttaagaatattatggtgatcatccaacataacccttatatgataacttgtaaaacgctttaagtctgtttttgaaacatattgtttgatgcctctgtcttttttgctgctattatgagatttgtcgggcttgttcggattaaacttgtaatttatcgacttaaaaagttagctggggtgcgttcttcggtactaatttgttgtaacgctttttcccatttagctgtcatttccggactagtcagcaatgattcgaattcaaccgctttacataaagtaattccggtttcactgacgtgcaacttattcttttcagtcactaaatagccgcgtttcttcaacacttccagcacattcggccgggtcgcactggtcccaatgccttgcacatctttgagaattgcctgggcttcttcatcatcaagcgttttaccggccgtcttcatcgccgtaattaaggtcccttcggtaaagggtaccggtggtgtcgtttctttttgcggtgtttgcaggttggcttggacttgatcaccttggtgaaccagcggtaaggtggcaatctcttgcttgtcaaccttgtggtcatcaaataaagcctgctaacctggcttagttggtaccttacccgttgctttaaaattagcgtcgccaacttgggcaataatggtggtttcttcatactcgtacggatcagcaaacattgctaacgtggttcataacaccaaaccatagacttgttgctgtattttgggcaagctggctaatttctctttcgttggcacaactttagtcatgataatggcataatgttcttcgacctttttaccgttgacgtaacgtttatttggggtggtattcggtaaagagacgggttgagagactaaacccagatacttcgtcagattagccactaaatacgcaaattcttcatcagtgatataagcacaatcggttcgtggataactaagcagtttgtcttcgtacaaactttgaatggccgctaaggtttggctggcactggcgtgataccgtttattcatggcactttgcagactggatagcgaaaacagttgcggactggcacgctttttgccttgctgttggacgtccttgattgaaccgtcctgcaagcctttttgaacgtgtttagcctgcatgaatgtcattagccctgattcgtctttaaaccgctgataagggtctaattttgcctcgaatttttgctgattagctaaaatttccacattcagttcaaaatagggttcgggcttaaagtttttgataagttgatctctttaatagaccatatacaaagttggcgtctgcactgcacatgaaataaccagttactaatggggtaatcacaagtgcatgccgccatcttcatgccggtttctcgtttgatgttgtcgttgctttttggtcatttcccactcggtctcttttaagccttgggcttgtttttgccgttgatagtcttcatctcgggcatataaggccaccataatggcatcactaaaggccgtctttaagtagtagcttggactaactggtttgtagtttaatggctcgtaatgctgcattttggcttttcggtattgatcgtccttagcttgttgtgcttttaactgcttttggatttgttcaatttggctagtcttaatcgtgggatcactttgacactcaccaataaaaatttgcttggttccgtcatgttttaagacccgttgcaagtcatgattttctaactgatctaagctaagctgtcccgacaaataagctaaccctaattgatgttcttgggtactgaaaacctttggcggtttttcttgccattgttccattgtttcagccttgcatggctttaattctggatcatagtacatcacggctgtataagcctgttcttgtctaactagagaaagatcatctaaatcaccattgggaaaggctcttttcaatacttcatggtattgcgtttgaatgacttgtttaactgccatgattgtccgtaggtctttgactgccctagtaatcttttgctgctctgctggtgaatacttttctagtagtccttgatcgacgtgttctagactttctaagctatcgtcatggatcatcagcgtatatttaagttcgcttttgacttccttttcttgttgcattaataacttgaagccaacgtatggacgcttggtaaacgtcaataattgctgggacagtaagttatttcgaatatccattaaacgttctgttaattcactacccttgaaaagggtttgctcgctatcggtttccttaattaattctcgtctttcagcggccgtcgtctgttcaaaatcaagctctggataaagctttttcgtcgtgcgatcgaccactttatttaggagttcatcagcctttcttaatgaactttcttgttgattaattgtcaataattgtttcgtcacatctgccccaactgcgtgtttaattaaggtactgtttttccaattaaatagcatgcgccgcttatcatctaaactctccaaactgatataagttttcagttcatggcttaactctttgaccacttttttctcgttaaaagagaagtgtttacttaggctatctaagtgacctctattaactactttttcttgattatttttataacttgctttggtcttgcgatagttcttaacttgttgattaaattcttttcgttcatatcgtttgctattgattccctcgtgttgggttggtgtatcatctatcccctgctcaataaatgatttttcactgatccgatccggaatatttttttgctctaaaacctgattaacactagctgcccaattatgacgccattcaattattttttctttcttatcccaatcaaccatcagtatctttctactcttagggtacttactagttccggtatatgttttattgccattctcatctaaaatatattgctttttgctcttaattccccatgttccgtctggattaaacggccggttagttaacatcacatgggcgtgagggttatctgcgtggtcgcgatgaattgctacatcagcgaccatgcccttatcaacaaaattttcttgcacgtatttaatcaataattctttttgttcatctgcacttaactcaactggtaaagctacgttaaactctttcgcataccgtgaatttgctcgtcgatcttttctttctacttcgttccataacttctctcgatcactcgcccatgctggcgcattttggggggttaaaataaaactatatggcatgacagaccgggcataaaaatagtgttgaccctctttatcatcaaatagtttttcaccgcttcgataagcggcactggcaatggcactgcgtcctttaccagcactaatattactaaaactcatatgaaagattgccatgtcagtcaccgcctttctttgctttatgggtttgattttgttgtcgccaacggcgacttctgatacaagcttttagtgcgatttaccccacaagattttggtggggtgtaagtgcgcatttacctcgtttcactcggtcttctgatttccttatatttactgttagtgtacgcctcacgcttcgctttttcaacatttatattgacttgtattgattcaggtgttattatctttattaattatatacaaatttgacaggaggagttaagatgacccaatcggcattggaaaaacaagaagctaaattaaaacagcttaatcaaaggatcaaagctgaaaaaagtaagattgaacaaaaccttggcaagcaaattattaaaacgtcaaatttagattacgccaatttatcgaatcaaaagatcaaagacctcgcgcaaaaaatagcaacggttttaaaccatgaatcaaataaccaattgtaactaagtggtgataatgatggctaatcaatacgaaaaattggttgcgcaaaaagctcgtttgaaagagaaaatggatcgggaagattttaaattacgacaatccaaatactatgaaaatcggcaagcccgcaaagcccgctctcgccgattaattcaaaaaggggctttattagaaaagtactttcaagctaataacctctcggtcgaacaaaccgaagaacttttaaaaacatttgctgactatgttaacgcccataaaccggataaattaaaaaacgatcaacctaataactaggccgatcgtttttattttcaggattgttttttggcttaatttctggattgtgtttagcaaagtcttttaactgtttttgaattctttgtgtaagctctgctttactttctttgtgcttccttttacttgatcgctgttgaattattttttgacccttacctcttctttttgattttaggtcaagcgtaaaatctgaaattttattttgatctagcttacttaaatgaccgattcctttaaagtttaaaccggctttgggaaagcgataaatattaccaagatcgacccaggaaggtttcttcagcccagcggattgccaatcttgaatcggataatatcgttgcttgatataagccgacttcttttcatatcattcagacgttaattttcgatttgatgtggcaagtaatttaaacgcaaccgtgcaggttgcgaagtgcaatgagttgcatcgattcgaagtcataccccaacgttgagtagtagaacgatcctttagttgattagagaattgtcggcgactttggaaaattgtgagcgtcaattaaccaccaatctgcaaatggtcgttttggcgtttttagcactattacttaaaagattttagacatcctcttaaaacaaatagacatctgtttttggacaccatatcgtaaaaatatgaaacaatgttcaggtgatgagagcttattaaaacaccaacggcgtaggatagaggatgtattttcacaattatgttgtttatttaatatcgagcaaaattctgcacgatcatacatgggttttcaaacacgtctaaaacaatgtctttttattggtacctggttaaaaattaactagcaccatgcgtattacgttataattctaaatctgattaactcttgattaaatgcatctttatcaatatcgtgaggaaccctagctattatacccattgttcagcactatactcatagtaaaataatttgaggttaactaaaattatacgcccagaggtttaccatctactatcgagtgggaataggattgtaatgtaagatagagttggaagcgcgatatatcggcattttggcagtgttaaaacttgactaactcattaaaaataacatgtttgtttgccaaaatgtttgccatataaagaaaacatccagtataacaactgggtgtttttatttatgaaaggtgtaaggataaggttgaaggttcgaatctttagtcagcactagatagagtctaatagcctgctataacggcatttatggtcgttataacaggctattttacgttaaaaaacgttatttttcatttaatacaagatttaaagcatgttaagaagtagtacatcttatatttagtgaaagaaaagttattatctagattattaaggattgttttaattaagagcattgtaaccgtttaaggtaaaattgttaataatctgtacatcatgataccatttattattttttctaaactggttagcacgattaaccgcaaaagaaccatggagagtgtataaaaacaatgtttctgcgtcttccttggataatccagtcttttcttgaattgcaggaactactcggttgcgctcacggatcataattcgcccgacgatatattctgtcaattcagggtccagaagtaatttacgatatttttcacttgaacctaccctttggcaggccggtatcaaagattcgttttctttaagataatcaatgctaaaattactgatcttaagataatctggtgaggtcatcttgattgcatcatcaagaatagcgttcaaaacatcattaatcgatttaaaatgtaaataaaaagttgagcgacttatgtcagcaactttacaaatctcttttattgatatttttgagtatggtttatcctggattagctccaagaaactatctttaattacattgactgtatatattgttcgcctgtctattcgatttgaatttttcattactaacttcacgatccctttacagattattaattactatattttattattgacaatttcataacggtgtccataaatgaacagcctcggaaaaatgttattcacttcaaatatataagcaattataattaatggcagattgcaagaaataacttgaacgaatttagtgacgtagattaagcaagaagatctcgattggtgtatgccaattaagacatttaagtggccgtgaattcagataccaattgatttgaaccagttggtaatcacttagttcttcaatggcttgtcccttgggaataaaccgtcgcaaaactcggttacggttctcattactaccgcgttcatgtggtgaataagcatgggcaaaataaacctgagtatctgttagctgttcaattgtctggtagttagcgaactctttaccatgatacacagtaagcgtcttgagcttgtcttgaagttgactagctagttcaagtacggcttgagtcatggactgactgtcgcgaccatggagccgtttaacaattgtcaggcgacttttacgctccacaaaagtagccacagcttgacctttacgtttaccagaaagtacggtatcagcttcaaagtggccgaattcctggcgagtttcgactttatgaggccgctcctcaatggagcggccgtgattgaacgtaccacgcttttctttagcacgatgacgacgaattccatgatcaggcaaatcgggcaactgtatatcaagccatccttgatcaatccagttatagaccgtcttgtaggcaatccccaccacatgggcaacttgttcaggggaccacttctggacttgaatcttttcctcgatcaagtgtttaaggtttttagtgagcgaagacttccgcccccgttgactaacctttcgttcaaagtcagtttgcgctagcccagcctggtactcactatttagccggtgaagttcgttaaagatggtggtcttactaaagtctaagtagttagcgatgtatcgcaaggaacgtccttcattatgaagcgtttcaatgacaacacggttaaggtccttctttctaacggattgtgtggtaacaccattaaagaccttgatgggtttttctgtccacttaaatgttcaacttaaattttacaatctgcctaatcatatcatttaactacattatgttcaaaaatggacatagtattcaataaggaggaataaaatgaatagacttgaaaatgtagtagctcgaattaatgatgcagatgcaattttaattggagctggttcaggaatgtcaaatgccgcgggaatggatttttggtatgaagctagtccattatttatgaagtacatgagtgacttttaccaaaaatatcactttgaaggtatttttaaaggattctataaccgttttgaatctcaagaagagcgatgggcttatttattaaaaatgttaaaaatggtttcaaccattccacctcaaaatagggtatatgattatctaaagacaatcattgacaataagccttaccatattattacaagcaatcaagatatgttgttcaagaaattcttcccagaagaacatgtcagtgaaatccaaggatcatggggattctttcagagtaaaaatacattaacagataaaaatttgtatcctatcgatggttatttagatgaattaatacctaaaatcgttgataatcgtcttccaactgaattaattcctaaaagtgaagttgatggtactccccttatcccatgggtacgtggtccggaatttcttgaagataagaaatactatgaagaatacgaaaaagcaaatcagtttctaggcaaataccagttaaagaagatacttttcattgaaattggggttggtcggatgacaccaatgtttatacaagagccattctgggaaatgaccaactacatgccacagtcattctatattaatttcaatcctcgtgatgtcttaacaaatccagcaataaaagatcgttcactgttgattaatagtgatacggctagggctttacaaaatatttctgaattaatcaaaggaggacaaaatgactaacacggtaaaaacagctcaacaatggttaagtgatgctgatgctcttttagtaactgctagtaacggtttttcaatttctgagggactaaacttatttgcaaaggacagtaaattgtcaacggttctgggtgacttagtagagaaatataatttaccaaatttattaggagcacttaactataattatcccaatgaacttgataaatggcgagtttatgcacgaattgcagaatactataattataattactatcctggtgaattaatggataaattacgacaggtgattggtaacaagccttatttcatctggacatcgaatatcgatcaccattttgcgttagctgaatttgatcatcttctcgaagtggaaggaaattggcagactggcatctgctctaaacaccctaaagaacacccacttgttgatttgaagtcaacccttcatgaaatttataaaaaagaccaaactggtacattaacagaagatgatttaccaacatgcgcaacttgtggagagaaactatcacttaatattccaggtcctgtatttagtatggaccaaacacaggtcaacggctttgagaactttttaaataattatcaagacaaaaaaattcttgtcttagaattaggaattggcccacaaaatcgaatgattaaggcgccaagtatgcaattagttgcaggcaataagagtagccgttatataacaattaataaggggcagttaaatatccctagtgttattgcagatcgctccattggtttctcatcaacaattatcgaagcatttaatgctttaataagtggtaaaggtgaagttgaaacacaggggcctgctaagccggcaccgcaattatctccagaagatcaacaaagacaagaaaaaatcttcaaaaacttttatccatcttatagtgtaaataagggttatcgtccaggggaacttgttatgtatacgacaattgaccatgaacacccatcacatttgcatatggtaaagtacggtaagtcactaatgtattcatatggtgatccggttaatgtgcattactttactcaagatggtcattatcacttggttaaactaggtttgaataaggataatgatgaagttcacggcttttatgtagagcctaatagttttattgcaatggaaagtgtgaagagagcaactggattttctcaaattagtgtcacgttaccgtcatcatcttcgaatgaaattttgattccgaaaaaggagcaattaaaaaagatgtttccacagcaacaagcattaattgaacgcttgtcggcagacaattgattttataaattatagcccccagatagtaagtttttgcgtaagtaccgaataacaacacgtattgaaaaaaagcgtcatgcacgacatcggttttgatgttacgcatgacgcttgcttattttaaatatgacattgagcctgggcctcttttgcccatggcaaaaagccctcaagatctttgttttcacgattcggtaagtgatcaaacagatacttgaagtatttatagatgtggcaaattctataattaatccgaacagaaattaaaaagcccaaagcaatcacttacaatggtagtagctaattccaaccaatatagggagtgattactttgggtacatctactttatcacgttttcaacgtggcgcactagcacaactggtcaatgaggggaataaatcttaccaagtaatggctgacgccttaggcgtcgccaaagctacgattagctatgagttggaccgggttaaaccttatgatccagaattagctcagcaagatgcagatcgcaaaaggcggaattgcggtcgtcgttcgatgctgacggcagcattagcgactttaattaccaatcacttacgattaacctggtcaccagaaaccattgcggccgcttataacttgagcactgcgtcaatttatgattggcttaatcgtggctggctccccttcaaattgactgatctacccaatcggaatgtccgccagcaccgagtgagcgaaaatcgtgggaaatttacaagtgggacttccatcgaacaacggccaacaactgttaatcaacggttagcttttggtcattgggaagtagatacggtgctttctagtcgaagtgagtcacgatcatgtctggttacattcgtagaacgtaagacccgacttctatgggccatcaaagcccctaatagaacggctaaggctctaaacaccgcctttggcaagtttatgggggccttcgggtccccaagtaaaatccattactgttgatcatggtaaagagtttgccaattatcaggccttagaacaggattatcagatcaaagtttatttttgccatccatattcaccatgggagcgaggttccaatgaatattttaatagacggttacgctggttcttcccgaaaaagaccaattttagccaggtaacgactgatgagatcctagcagcacttgaactaattaatcaacgaccattaaaaatacatcatcaacagactgccattgaaagattccgggcttgttcggattaaacttgtaatttgccattataaaaaagagattactgatctaatcggtaatctcttttaaaataatattgattgaccaacattaaacactgagacaaaacttaatgctgtcattaacatcgtataagcctttgtaactgaagtttcattaagcttttgattgatcaaagtaccaacgtatccaccgacgatagccatcacactaacgacgacagcgactttataatctatattaaacaaatctccatgcactccactaagtactaatttagacaattgagcaaagaatatcgtagcgattgaataaatagttgattctttcatcgtaaatgagaacaaaagcatcagcatggcaacattcaatggacctccaccgattcctaagaatacagaaatagcacctaacaacaaaccgactatgaaaatagaatcaaatctttttaatcgatattttccaaagtggttttgattcttcgtataaatcaaaataaaaattaacatgactagtaacaagacgttttgagtaattttaacttgtgtattcgaaaataatgttacgaaattattgaaaatcaactcaccaattacaccgccggcaactgatcctaacgaaatcgataacaaagttttcaaatcaaatgagaagccactcttagtttgtttaaaaatcgaaacgatactcatggtaaagactgcaatcgctgaataaacaccaatcgtaactgccgtatcttgtcccaacaaatcaaatattggttttattatgactccgccacccaaaccagttaaagcacccaaaatagtagctatcaaaacaactgcactatatacgatttcaatcacgttcaacatctccgtaacgaccaattactactttttggaactcatcttcactcatcgatggctcacctagaaagcttactagaatatctgaacattgactctttggcaaattggcggtatttaagcatagatcataatggtcaacatcattccatttgtcatcattattaccgattctaaaatacatccttcttaatgagtcctcatataccaatttgctttgtctcaaagaatcgtcagttaagtttttatatttgggcgcatatgtaacacgagaacacttggcattaacgtcgttattataaataaagacttttcttaccgtattatcctttggaatatacttctcaataccaaagtcatgaattacgatattgtcactatttgatgcatctaatattttgttcattattttattttgaatttcgcttaattccttttttaaggatgcatctgacgaatcacgcattaatttttcagtaatcaattcggactgctcaatcaaattttttgaatctgagaattctttaacaaaacgagcttgatcccagaaatcataatctaacttgttagctgctgctgaaacaatccaacgtcccatactacaaaattcactgttaaccaatgttatattactcattttacatatgctccttgcaattcattttgtctctttaaactgaggacatttctaacttcgtccttttcaagatttgcaccattacttaaaattacgtttttataccaattaaatgatttctttttgtatctatttccagttccacgtccaaaattatccatatctacataaatgaatccataacgtttagtcatttggcctgtacttgcagcgacaagatcaattggtccccaagctgtatagcccatgactggtactccatctatattgatagctttttctatttctaataaatgttttcttaaataatcgattcgataatcgtcttcaactgtataatgaccttgttttttgatgagattatcttctgcacctaagccattttctacgaccattaccggtttttgataacgatcatataaaaagttcaaagcaattcttaaacctttagggtcaatttcccaaccccaatcactcttttctagataaggatttttataacctgtttcaaggccatttaaacctttaaaaattccttttgtcttagaaccacaaacgtgtgtcatataataactgaaacttatgaaatcgactgtcccatcccttagaatttcatcgtcgccagtttgttttggcaaattaatatttaaacgttccaattcttttaatttataatttggataatatcctctagattgaacatcgatataatagatcatcttatcttggaaattattatttccttgtacatcatcaggactagcactattggcgtatgagaaatgtccacaatacattgctccaattttattattggcatcaatttcatgagcaatctttacaacttttgctgaagcgattaattggttataagcggcaatatctttcgtcttttgatctgcgtctaaagaaatacctccagcattccatggcatcgttgacatcacattgatttcattaaacgttaaccagtaatttacacgtcccttaaaatgctccaataccgtcgtggcatacttaacaaagaaatcaattgtttttttacttgtccaaaatccatactttttaagacccatcggtgtttcaaaatgtgacaaggtaattaagggcttgattccatatgaaagacataaatcaattactttatcgtaaaaagctaaacctttttgatttggttctgcatcatcgccatttggaaaaatccggctccaggcaatcgacatccgatatacattgaatcccatttctgcaaatagacgaatatcttcttcataatgatgataaaaatctatcgcattgtgtgttggatagtagtatttatcttcatcgattgtttcagagatcactcttttttgttttctacttcctagagtcatcatgtctgctgtacttaatcctttgccgtcttctaaataagcaccttcgatttgattagcggcagttgctccgccccataaaaagttctttggaaatttcatattatcctcctcaggaaatgttcaataatgaatcgccaacgttgatttcttttgattttgatagtgcagtaatattcttataatcattactatttgtgactacaatacttgtaatcgtctttaaatgatgttctttgataaagtccaaattagcatctaacaataaatcgccttttttaatttgttgatctttttctacgaatctcttaaagccttttccgttcaaactaacggtctctagtccaatatgaattaaaatttctgcaccattattagtcttgattccaattgcgtgattgctgtcaaaaacagctgtgatggttccatctgctggggcgtaaacttttccgtcttccggttcgatggcgattccttgacccatagcaccactagaaaatacttgatctggaacttcctttaaagaagtaactacaccgtgtaatggtgatgacaatgtgtcaggtatcttatttttgactacatcttttaattttgtgtttttatcatttttttcagttttatctgggtctgtttgttcatctattccgatgatcaattgagcgacaaacgaaactacgaatgaaatggcacaaccaattacggcatatacgaagttagaccaacctttagttccaataaaacttggtaaggcaaataatcctggggcgacttgtgcatatctaacagttccaaaaatcccgataaataatcctgcaatacccccaccgatcattgatgaaataagtggcttcttgaacttcatattgacaccatacaaagctggttctgtaataccggctacggctgaaatacctgttgaaagtcctaattctttagtctttttgtttttagattgaatacctactgcaagtgcggcaccaccttgggcgatatttgaaaccgtcattccgggaccagcaatagagtcaaatccttgtgtagctaattgattaatcccgagaggaatcaaaccataatgcattccggtcataactaacagtggtgtgaatgtcccaactaatagcggaactaaccattgaacatgaacatctaggaaactgaagaatactcctaagatacttcctaaccaataaccaataggtccaatgaatgttaaagtagaaaatccaacaatcattagtgttaataatggtgtcataaataacttgatagctgatggcatatgcttgtctataaagggttctacataagacataaaccacatagccaaaataattggaattactgaagaactatatgttgctaaagtaactggtactccgaataaattaatacctgtatgatttgtttgagcttgatttaccatttgaataaatgttggataaattaaaattgctccgattgacataccaacatattgattaactttaaatttcttggcagctgaattcccaattaaaacaggtaaaaagtaaaacgctgcatctcccataaaattcaaaatttgataagtctgagatttgcttgaaactaaacctaccaaaactaacaaggtcaaaacagctttcaacatcccggcaccagtcaatgatggtacgattggtacgaagataccaacgatagtatcaagtactttggaaacaactgacttcttttcttctttgtcttcagcgggttttgtctcacctatcgaataatcatcagtaatcgatttataaacgttctttacatcgggaccaatgatgacttgatactgtccaccttgattaacgacgctaactactttgcttaaatcttttaaagcgtcagcatttgcttttgaatcatctttcaaattaaaacgtaatctagtagcacaatgggttaatccagatacgttatcaattccacctacattatctataattgattttgcgagctgatttttactcattatttacgccctcctgtctctttacgtttttcataatagcaaaaaaagaaagcgctaacacataatcgtcagcgctttcatcggtgttgcagcagcgtctcactatcttgcacaattactgcaacaacgtttcactatttaactaattatcttctaaaagtggattttttgaagatcgtctattttcaaataacttggaaacttgttttttattatttaaggcttgttcttgattctcgttgacaaagtcagcatatacgatatctaacacaaacatcgcagacaaaaccgaactaaaattgcccaaattattaatcaatttttccctagttgaaatataaataacattattcgtcaactcggtcaacgagtttccacccatggtcgttaccgctacaaatggcaattgcttatcatttaatctatgagcaatctttaacaaattatctgtttcgccagaataagatagaaggatgaaaagactatttgaatccgaataattagctttgaagaaggcattgtcccctcttctttctactgaaacagttttcccaacttttatcatcttattttcgaaattttctgctgccaaaatcaaatccccggcggcataaatatatatatgatcacgaccacgaatcaaatactcaatcgtattcagactggatttcttcaagagagctaaagaatcgtcaattatttccttatacaaagtaccaattttattattgacaattgctgtcgtatcttctgataaaaagggtatattaggatcaatattattaaaatgtgaatccaaatattcgttctcttcttgatattgttttacaaaatcaggatagcctaagaatcctaatttttggcaaaatctggtaatcgtcgaagcagaaatatacaattctttggcgatagtatgcgtactaatttttactaaatcattctttctcttcaaaaagaaatccctaatcaataattccgcatctgtacctttttgaaaattatttagcctatctcttattaacaagacatcacctcccttttacaataattatgcaacgtaaagagttaagatgtttagcgctaattagttctttatattataagtgaagagaacaatttctccattcttagttacagaaagaagtctttttgtgactcataatgtagtatcacgatgattagttataggaaatggatttgatttgaaatctaagtttaaagattacagtagcaacaaaaatgatatgctttaaagaataaatacgttgatataggagattttaatgaaaagtatttgggagatggacgcaccaataggcttggcttttttctttgggccagctttaattattggaattatgatgttaataagtggttttaacaccgtttcagccattatggtcttagtgttagttttgtgtgggcttaaatacatgcatacttcaataattggtaagtatagaataatgaaatctattgttaacagtattcatttaaaaaaagacagtaagatattagacgctggctgtggtcacggtgccaaatatgtcagttaataggttcacggacgttaacgtctcaatcgactagagaaaattctaacaatattcaatgatactgaaggttcgtcaaattaaaaacgatatgccatataaattatcagaaaccagtcttacagttccatatcaaagtgactgtttactaataaccaacgactatttcatcaaaggctgagtactccatgtccgcctttcgaataggatcccggctggaaggtattctgggcaaggcccagtggtgatattccacttagcaagtgttgtgtgcttggttagtggaagaccagtatttaagacgtggtttatcggcttaaatctgtgtccaccacgtcctggccattgcacagaatgcctggaagccagtgtaggacgtcgccacaacagcaggtttacgcaaactcgcactatttccagcggtcctaagctggctgattttaaacttaagactcctcattaacgcaagaaaacaccaagcacaacggtaaatctgatttattttgataaattgaccaaaacttgatggctatcaagttgccatcaagaatcagcggctatactagggtcatcaaatcaaataaggagttgcaaattatgaaaattcaggggtttctaactaaacatacgaatcaaatcacattaatcactggtattctgatcgtcctcggcatgctcagcaaatacttgttccaattcacactggactaccaagtcattctggctgtcgcatccgtgattgcggttattccgatcgcggttcgggcttggagcgcgctgcgcaacaaggtcttcagtattgaactgttagtcagcattgccgttatcggggccttcatcattggcgaattcaatgaatcagccatcgtgacgttcctattcttgttcgggtcctacctcgaaagcaaaacgttacaaaagacgcggacggccatcaaaggtttgactgacatgtcaccgacgaccgcgaccctcgtaaccgctgatggtacggaagaagtcgacgtcgatgatgttgacgaaggcgatgttgtcttagtcaagacggggagccaagtccctgtcgacggggtcgtcgttgaaggtaatggttacctcaacgaagcttctatcaccggtgaagcccgtcagatcaacaaacaactcaatgattccgtttattctggtacgatggtcgaaaacggctatcttaaaatcaaagcgactcaagtgggtgatgacacgacgtttgctaaaatcatcgaactcgtcgaagaagcccaagacacgaagtccaaagctgaaaagttcatcgatcgctttgctcaatattatacgcctgccgttctcgttttagcagtcttagtcttcgccttctcacgtgacttccgattagcgatcaccgtcttagttctaggatgcccaggggccctcgttatcggtgcacccgtctcaaacgttgccggaatcggtaatggtgccaaacgtggcatcttaatcaagggtggcgaagtcgtcgatacctttgccaaagccgatacgttggtcttcgataaaacggggactttgacggaaggtaatactgccgttaccacgatgcacacttacacgactaacgccgacaatcaactcgctttagccgctgccatcgaaggtgtttctgaccatccactcggtcaagctatcgtgacctacgcagcccaaaagtccgctggtgtcgcacccgtcctcgatgatactgaaaccgtcaaaggccaaggcatctgcgctaaagtcggtgaccaaaccgtcgtcattgggaaccaaaagatgttaaccgcgcatcaaatcgaacttaacccagctcaactcaaagacctgaacgatttacaagccggtggtcaatccacagtcatcatggccgttgatggccaagttcaactgatcttcgggattgccgataccatccgcccaggcgtcaaggattcactcgccgcactcaaagctcagggtatcaagaaattagtcatgttgactggtgacaatcagttaaccgcccaagcagtcgcagatgaactgaacttagacgaagttcacgccaacttattgccagaagaaaaggtcgaatacgttaaaaagctcaaagctgatgggaacacagtcgcctttatcggtgatggaatcaatgacagtccgtccatcgctaacgcggatatcggtattgccatgggtagcgggaccgatgtcgctatcgacacctccgacgttgtcctgatgcaatccagcttcccagcactggtccacgcccatggcctcgctaagaagacggtgctcaacacgcgggaaaacatcttcatcgccatcgcgacggtagccttcctcctgattggcttagtcttcggttacatttacatggccagtgggatgttcgtccacgaagccagcatcctagtcgttattttcaacgcgatgcgcctgattaacttccagaccaagttcgacaaacaacaacctgccaaaacgatccaagccgcaacggcctaaccacgctacggatatccacccccagcccataaaaaatggcacccagactagtcttccccaactagtctgggtgccattttttgactaacaataactaaaatgataacgccataataatttcataagtacgctaggttgattaattgcaattataaactaaaaaagatcttgtaaagccaaatcccaatcacggcgccaacaattggtgccacgaccggaacccagctgtattcccaatgtgaagaccccttattgggaaccggtaatagtgcgtgaacgagccgcggccctaaatcccgggcagggttcagagctggcccagtcggcccacctagcgagatgaccattgccgcaatcagtaatccaaccccgatattggcaatatcgatattttgatggaagaacatcccgcgatacagtcccatcgccccaaaaattaggacggcggtcccgaccatttcggtaatgaacccgttcagctgactgtgagcggcgtcactagtggcaaacgtccctaatactgcgccagcatcagtcgtttgtcggtagtgtggtcagtatagtgcgagaatcaagcattgtcctacgatggcaccgagaaattgccagattaagtactgcgcaacgtgtgaccaggggaagagaccaaccgttgcttgaccaatcgtaatcgcagggttcaagtggtttccagagattgacccgaacatcattgctggcagcataacccccagcccgtaccccgacgccaccagtaaccaacccccgttggcgagtcctggatcgtcgtttccggtcgtgttctttaggaatgcattagcgacagcaccgttgcctagtagcactaggatcagggtgccaaagaattctgcagcgtagcgtgcttcccatgaacctgtcatcttgtatcctcctcgtatggtaccgagcatctatgatactttgaaggatagcatataaagccatttatgtaagcgcttcattttactgtgataagtcatttctaatcatctgagccggcctcctacttatacccccgcgcgtattaaagctgagctagcgacgtttagcaagcacgatatcagaattcaaactggcgaatcagattctcaccctggttcataattgacgaaactcaataattgcaggacttaaattaccaccagtgtcgctatccaccacttgacttcagacagacttgcgtactggagttcagtcattaaagctaactttcagttgctgaacatctagaacttggcatgcaaaaaagtcccttatggcaggtcagctgacaaccataaaggaatcataacaagcggaaatcggcgcaagcaaaccacacccccttatccgtattattggctaggccacgtattggtcgttcctagcatgctgaactcgccccaccccttctgagaatgcgtcacttcattgattgctgttagcactttgttttcgtcggtggtgaagtgtaacttatcgacaaacacctgactggcaatctggtcatagacaacgcgggcttggcgttcaggcgtctgttgattatgtttgactttactgataccagtctcaagaatatttagcacatactggtaacgctcgggcgtagcatgttgctgcagtgaaagctgtaaccgagtaaataagtctaaaacttggtttttagcatggtccgacttcgtgttagtcacaaaattccctcctgacattaaggttaaaaaagccttttccccgtggtcatcgtaaggcttccccacataactgtcaaacccaggaaaacgtttgtacgtcagccatttgaaagttaacttgataaattggtcatttggacaaaaaagttgcatctgtatacctatgggggtatattagtaattgttaataatgcacatctggaggggttaacatgattaaagaaattcatgatcaagattttgccaaagaaacggatactgggattgccgtcgttgatttccgcgctgactggtgcccgccatgtcgtatgatggacccaattttgaagtcattgtccgaagatgccaactacaaagacaaggtcaacttcgtctcattgaatgtcgacaacgacaaagaaattgcgagccaattccaagttcaagggatcccaaccttcctaatcaagaaggatggccaagtcgttagtcatctcgtgggcgcgcggccaaagccggcctttgaagccgaacttcaaaaagcactcgattaagtcgataggaggtctccatggcaacgaccgaagaatatgtcaccagtaaacaaattcagacccgtttgaagcgctccgctggtcaactggacggcgtcttgcggatgatggatgagggccgcccttgcgacgacgttctcgttcaactttccgcggtcaagtccagcatcgacaaggcaatgaagctggtcattgcccgcaacatcaataattgcgtcgacaatatgacaagtgccgatgttcagaacctcgagcattcattagacttgttgttaaaaacgaaataacattcaatcgattctaaaaaacgtgcgtgactgcagcatcaagttcatttgattgctgcaatcacgcacgtttaatattaatcactcgttgtgttcatcattatttaaggtcaactacggccagaccaggacgcggataagctgaccaattaatccgccaactcaactactaacagcgctggttattttccaattggcgccagctaacgccactaatccttccagtcgccctttttccaatcatcatggttccaatcatcttttttccagtcatcctcgtcatcactgtgggactgctcggtatccttgggcgctcgttttgctcgtttcaatagtactgtcgttgaaacaaccgttacgaacccagtcgcgataataaagacaaacgtccacatgataatatcactaatcgacatcttggggtccctcccttaattaatgtcgctagtatagcgcagcctagtcacaatagcaaaagtgcccggaatcgcctgcccacacaatggcgatcccgagcacttagtttgaactgacctgactaattagtcatcatcttcgtcttcttcatctagtccggtacgtgcctcgttgcccaagtaggcttgcagttcccggatgttgcgattattgctaccgcggtaagcgactaaccatgcggctaatgctggccgggtctctttttcagctaacttgatagcccggtcaacgaataggttttccgtatcaaaatccttgattgttgcggccacgagttcatcagcagattgatacttgaaagccccgttttcttccaacattgaatacttggttaattcagccgttgtggaagatggcttttggttttcatctaagagtaagtcaccgagttcagcaaactgacggacattttggtcgatcagttgttgatattccgtccgcaatgccaatgattgcgggcctttgacgtaccatttgacctgacttaacttaacatatgcgaccattagattcgacaggatgtgattcgtcatcgcaccggcagtcgggacgtggtggtcaatatcactttgttttaattcagcggcgtattgttcatcgatcgttaattcactcatgaatgcgtcctcctatttaaccttaacgttttctacttcatagcccaaaccagtcacgacttgtgccaaatcatcggccgacgttacttctggatcaaagttggccttgaccttgctagcattgaataacactttgacattttcaacaccctcgtggttcgacacagccttttcaatcttggtcatgcatgatgggcaggtcaacgttcctaattgcataatacttttcatttcaattacctccgtatcaactcatttgatggttctatcataaccggattttattgataagaacttgaccgccgtcaagaaataataaaaagttttcagttacaataaaattgttaaaaatcaagccatagatgaaacgcgaacgcctacgccatagcagaaatctggtatagtaaaggtgaatctaattagggggtgttctcatggcagagcatgaatgcgttcagttagtgccgattttcaaggaactcgctgatgaacagttagatacaattgaaacgatcgttcagcatcatcactttccatccggcagcaccattttcagcgctgacgacccactcgattcgttgatgattctcgccaacggccaagtcaaagtctatcaattagccgcaaatggccgggaacagttactgtacttattacaaactggtgatattgatggcgaagctgccttattcgagaaccaacgccgcacgtcctttggcgaagcgttggttccaacctatatctgcagcatccgccgcgccgactttcaagcgttgatgcaacaatatcctagcatcagcatcaacgtcttaaacgtcttcggcagacggctcacccagctggaacgccaaacgacgagcacggcgaccgagtccgtcgaagcgcgcctagccaactaccttacggaaacggcggctgcactcaagacagacgcgtttaaattaccattaaagaagaaggacttagcgaccttcttgggaaccacccctgaaagcattagccgcaagcttgcgttatttgaacgccaaggcctgattacccaaaagactggcaaaatcatccaaatcaacgatgcagaccaactcttattaactgaataagataatcaaaccaaccggatggcgattcaccatatgcgtgagcgctcatccggttggtttgtttccccgcctatttttgcgctgatcgcgcccgtaatactgtcccattcgaatataaggagccaaattaatgcgactgccgtaactgaagcgcgccgtttggccactaaatccgcccggtttaattttgctgacagctctcactgtccaaaatcattttaattttcagcggttctcgacgataccacttggattaatctaaggtataattaaactagggttcgtctgtaacggatgatgacactgacatactttcaattgttgtatcactaaataccgaagaaatttttctttgtttcaactccgaattcacttgtgttttaaagcttttaagactcaaaatttgatcataaacagtaatttgtgaagtatcattattagtttgtaaaaattgtatttgcgactgatattcaggctttttaatcaaatagttccaactaacaccagctgcaattgacaaaccaatgatacctattaacaaaacaatatgtcttccaatgattctaagcacattttttaatttaattcgtaattccattatttatcctctacattacttaactcttgcttcaccgtcactaatgctgcatgaatcacctgatgcatatcataatatcgatactgccctagacgcccaccaaaaatcacgttgccctcctgctttgcaagttcagcgtattgcttatacaacgtgttattgcgagtattattaactggataatatggttcgtctccgcgtttccagttagctggatattcacgagtaataattgtcttacccttgtcaccttttccaaattcaaaatgcttatgttcgatgattcgagtatacggtgtttccgcatccgtataattaataacagcatttccttggtagttgtcaacgtctcgttcttccgtttcaaatcgtaaagaacgatattccaattctcctaattgataattgaagtattgatcaatcatcccagtaaatatgatcttcggaaagtcggctaaatactgatttttattggcgaagaaatccacaccggtctcaacatcaatttctgggtgatccaacattttttcgacgatttgcgtgtaaccaccaattggaatcccttgataagtatcattgaagtagttgttatcatatgtgtagcggactggcagtcgacgaatgataaatgctggtaagtcggtcgccttttgaccccattgtttttcggtgtagcccttaatcaatttttcataaacatcagtaccaattaacgatattgcttgttcttcaaggttcttaggttcgccgcttaactgagcagcgtctttttgttcctgaatttttgcttgtgcctctgcaggtgtccgaactccccacagttcactaaacgtattcatattgaagggtaagttatacatatgtcctttataatttgcgactggactgtttgtataacgattaaattcggcaaattgattaacatactcccaaatctgcttatcagaagtatggaagatatgagcaccatattgatgaacttgaattccatttacttctttggtatagatatttccagcaatgtgatcccgcttttcaatcaccttgacgtgtttgccacgcaatgccgcttcatgggcaaagactgcgccgaaaagtccggcaccaacaaccaaataatcatacttactcaattcaacttcctccaagaatatatagtctcatcatgtcattatatcaaaaaaactttaatgtaaaagggcaatcgttatattgttgtgtaaacatcgataaaaaagacgactatttttacaatagccgtccaaagtaattatagtattatctacccaatcccaaagaatccatgcataaacaacgccgcacaagcagccccaacgaaaggtgcaatcccaggaacaatgatcccgtattgccagtcgctgtcagccttgttcttaattggtaagatggcgtgggcgatccgtgggcccatgtcccgtgcaaggttcatggcgaatccggttgggccacctagccccatcccaatggcccagactaagagcccaacaccaatcggcacgatccccggcgttttcacttcagaaatagctaaaatcccagaaataaaaataaatgtatcgaagaattcgacgaagaagttccgtggtaagttccgcacagcgggtgcggttgagaataagttccgaatcgtaattggggaaatctcatcagcagaagcggcaaaatggtccgcgtacatgatccagacgatcacggcaccaacgaccccacccaaaacttctgcaactgaatacgggataaacaatgaccatgaaaggttccctaaaatacattgggctaataccatggccgggttaatgcagacattgccgaaaatgaagagggcaattgtaatcccaaaaccccatgttgtaattgcgaagatatggccggaaccgcgatacttggtcccctttaaaacctcactacaatgtacaccgacaccaaaaataatcatcaaggcggttcccatgaactctgccaaaagctgatgaatcactatctttctcctcctgtggcgttgttacgcctgtttattttgaaatagacgccacttactttcagaaagcaccggcacttttttcacacgaacaccattatacacaaaatccgaatcgtttaatatgtaaatcgcaaaaagttttgattttacaggattaaacgttcggattcaattaaaaggttctgattattcttttttagtcgtttttttgcgtttgaagaattgtcgccgaatgcgacgaatcatccgtggagactttggctcaatcttatgctcaaaccattcctgcaccgacgcattgacgacgccaccaaacatcaagagaatcccggaaaagttcaaccagaacattagtacaattaaactcccaatcgtttggtaagtcgtaatccgtttagcaaataattcgatatacacccggaacccttgcgagatcacgatccagccaatcgtcgtgactaacgcccccgtccaaatgtaacgcaatttcaccttggcgttcggtacaaagtaatacaacaacatggcgacgacgaacatcccaacaaaggtaatcaagttcttgttttccaacaactgattaatccaattcggaatgattgcacgcgtgagatttgttaaattcaagatcacatctagaatcaattgactcaacgtgaagaaaatcgccagccctacgattaggagtaatagtcccaacgttaagaaaaaggcaataattcgcgtccaaacggcattttgggcatccgtaaccccgtacgcctcatttagactcctgcgaattgcagcaataattttagacgccgaccagactgtcaccaaaatcccaattgacaaactactactgctgccactggacaggaatgaaactaaaatcggcttaaacgtctggtagacgttactaggaatgacttcctgagcgtacgctaaaatctgcccagacttcaaatcgaaccgggcaatgaggtttccggcaatcaagataatcggggcaatcgacattaacgcgtagtaggccagcacaatcgcattgttgctgacattggcttgtccataccgccgaataataatttccaggcttttcgcaattttagggtaacgggcttttaaattcattcatttatcctcaacgctcacttatagtatttacaattatacaatggaatgccgcgggaaacaccttttatactaggattagtgctttcagcgaatagactagtcggtccaatcagatcaattgatggcaatacctgaccactgacgagtaaaatccgcttatctcccagccgtcagccactttgacaaaatcaagtagctgcctagacactcagtagtaccgggccatctagattttaacgcaaaaaaataaccggtattgatacccccgcggcatccatctccggctacttcactaatttcacatctttacaggagaagtgaaaatttttatcactatgtcagtgcttaatattacactgtttatacaaaaatgcaaataattttaatgtgtaccaatttttttcataatcgcttgtaagatgtattccgcagcatgaccatcgccataaggatttttagcgtctgccatccgttggtacgctgcggaatcatctaacaggctggtcattgctgccgcaacctgctgaccatcagtgccgactaatcgtaacgtccccgcggtgaccccttccggtcgttcagtagtatcacgcaatacgagcaccggtttattcagtgacggggcttcttcctgcaccccacccgaatccgtcataatgaagtaactgcgtgccgccatgttgtggaaatcaagcacgtcgagcgggtcaatgaggtgaatgcgatcggtatggccgaggatacgtttagcgactgtctgcactgccggactcaagtgtactgggtagaccacttcgacatcgggatgctgagcaaccactcgtttgatggcgacaaagaccgcttccatcggggcgccctgattctcacgccgatgcatcgtgagtaagatcatccggtgcccaggctgaatcaaatcaagcgcagcgtgttgatagtccatcgaaaccgtctgttttaaggcatcgatggccgtattgcccgttaccgtgatggccgtatccggatggttttccttcaatagattctgccgacttaattcggtcggtgcaaagtacatgtcggccagcacgtcggtcagctgccgattcatctcttcaggatatggcgagtacttctgccacgtccgcaaccccgcttccacgtgtccgactgggatttgatgatagaaagcactcacactagctgcaaacgtcgtggttgtatcgccatgcaccagcacgatatcaggcttgactgtatccataattgcatctagcttcgtcagtacccggctggtgataccagctaacgtctgattaggcttcatgatattcaaatcatagtccggcgtaatgtgaaaaatcgtgagcacctggtctaacatctcgcggtgttgagccgtcaccaccgttaccggttcaaattgtggctgttgctgcaactgcaacacgatgggcgccatcttaattgcttctggccgcgtgccgaaaatcgtcattaccttaattggttttgtcattaactttcacctgcatcatttagtttctaatctcatcatagcgttagttacgtcgtggcgccatcatttcgagtaaaagtttagttattttcaaggattcagccaaacggacgggtaagcaaaaacaccaccttgattgcaggcacacgttctcccgcaattaagatgatgttcagcccgtaccgtttctaaaaaggtaccgtcttcaataaaatatcacgaatcttatacgcgacctggttgtcaccaccaaaaacaccctgattttcaaataagactaaggcgacttgggcatttcgcgaccccatatagtagctatgaaaattattgtcattgccacccactcgaatcaactggcctgcctggtaataaacgcctgccgaatatttaatttgaaaattatccgcaagtgactttaaaccggcttcaccaactagctggccgctttgaagcccatacataaatttataataatcccccacactcatatatagactaccacagcctaattcactagattgtaacggcttagaaatgatgccactctgaccaaacccattagccaagcgatacgaagtcgggttgatcacattgcccggaatatcgttatattcataggtatgttttaatcccaatggccgaatgatgtcattagtcaaagccgcctgataggatttatgcgtcactttgcgaataacccctgccaataaggtaaagttcgcgttggaataggcataagcatgattattcgtcgaccgtaaatgttgcagtgtaaagttcagccgcgccgtctccgttggtaaaatcgtctttggtgttatctcagtcatccgaataccggaacgatggtctaatagttcacgtatcgtaatctgattggcgtacggaatttccgggtaaaagtgactcagcttcgtcgtcagactcaacttaccctgattgatcagtttttgaatcatcacgccagtcacagctttttgtaatgacgctaatggataagcctccgtcgcagtattgcggacttgattggcatcatccgcataaccatacgttcgaacccggacccccgccggaccgttcgtggtcagtaatagtgtccccataatatgatgacttttgatcaactgatcgatttgcttgattgcctgggcctcagtaagctggccgggcttcaatttaggcttagtcgtcgtttgctttttcgtcgcggatttgatttttgacgctgcctgctgtactttaattgtctttggtgtcacttgctgtgatccccacacacccacgccaatcaaccccagtaagattggcaataaacttaataaccaacgccgtttgttcatcatgatccccccctgtttctgatgagtcgcccgtcaaatctgacttgactactatttaattgccccaagcatacgccctcgcttctgactttgcattaaaatgcgaattattgttagtccgccgaaccaaatcgcaagcgctatcaacagcacggttttaccacaatcactaaaaattcatcaaaatttagttaatttaactcgtgcaatttccgaacgtgaccattaaaatgaagattatagttaacttattcaaggaaggatgatcatattgagtcaagcaaccgattatgtccaacatgtttaccaagtcattgaacaccgtgatccgaaccaaaccgaatttttagaggccatcaacgacgtcttcaaaacgatcacgccagtcctcgaacaacatccagaatatatcgaagccaatattttggaacgtttgaccgaaccagaacggattattcaattccgggttccttggctcgacgatgctggtcatgcacgagtcaaccgtgggttccgagtacaatttaactcagcaatcggtccatacaagggcggcttacggttacacccatccgttaatctgagtatcgtcaaattcttgggctttgaacagatcttcaaaaatgccctgaccggcctgccaatcggcggtggtaaagggggctctgatttcgaccctaagggcaaatcagacaacgaaattatgcgcttctgtcagagtttcatgaccgaactgagcaagtacattggtctcgataccgacgttcctgctggtgatatcggtgttggtggccgcgaaattggctttttatacggccaatacaagcgactccggggcgctgaccgcggcgtactcaccggtaaaggtttgaactatggcggttcgttagcccggactgaagctactggttatggtctcgcctactataccaacgaaatgctcaaggccaaccaactttccttccctggtcaacgtgttgccatttctggtgctggtaatgtcgccatctacgcgattcaaaaggttgaagaactcggtggcaaggtgattacctgctccgactcaaacggttacgttattgacgaaaacggtatcgacttcaagatcgttaagcagatcaaggaagttgaacgcggtcgcatcaaagactatgccgaccgtgtagccagtgccagctattacgaaggttccgtctgggacgcccaagtagcttatgatatcgcgttaccttgcgccacccaaaacgaaatcagcggtgatcaagccaagaacttgattgccaatggtgccaaggtcgttgccgaaggggctaacatgcctagcagtccagaagccattgcggcataccaagctgccagcttgctatatggtccggccaaagctgccaatgctggtggcgttgccgtttccgcccttgaaatgagccaaaatagtatgcgtttgagctggacttttgaagaagtcgataatcgcctcaaacaaatcatgcaagatatctttgcacactccgttgccgctgccgacgaataccacgttagcggtgattacctgagtggtgctaacattgctggcttcacaaaagttgctgacgccatgttagcgcaaggcttagtttaagccaactacatttaatcgcatcaaaaaaacggattgtcgggactttaatagattccatatcaatacccgaaaacgggttcaaaccgtaactctggatctcaatagttactataaagatatcgttaaggaaatgtttccaaacgcagaaattgtcgttgatcgattccacattatcgccatgatgacgcgggaattcaaccagactagagttcagacaatgaaaaaatatgacaagaaatctatcgaatatcgactgcttaagttctcatggaaactatatttgaagcactttgatgaactagaagtcagccaaactttctatgatcgtcatttacgacagcagttaactcaacaagggcgagtacaaatggagcttgacactgatgacactatttcgagcacatacgatgcgctgcaaggtatcatgtcctgtcttaaaaatcatgacaaagatggcattgtctactatctctacaaaaatgaaaacctaagttttcaaatgaaggaaacactaaaaacgtttaaaagtaatctggaaattgtcttgaatgccagtgaatctaagtattctaacggtccaattgaaggtattaatcggatgattaagcagattcagcggactgcgtttggatttagaaatttccatcatttaatctcgcggattaagcttcaacaaacgagaacaaaaccaaatacaaaaacagaactagaagccgcttagcttctagttctgtaaaactatctatcaacaggatttgacagagagccctaaaaacagtgccggctcaatgattagcctaatttagctttaatattttttaacgaaacttcactcgtatccgcaaagcgcacatccgcttccatcaattgattaccaatcccgattgaaagttcacccgcagcattaattgacttaatgccagcacctgaatcttctagaccggcaacaacttctggtgctaagtccatcacaccggccgccaaactgaagatttctggatctggttttccggcatgcaatttggctggatcaaccacgccttcaaagtagtcggtaattttcaactgcttcaaaattgcaggggcgttctttgaggctgaagcgacggacattttatagccgctagcttttaattcgtctaagaaggctttcatccctggtagcacgtcatctggcgttaatgattcaaccagcttcaaatacttggtgttcttttcggtagccaaagccaccttttcatcctcggtgtagtcattttcatggccacccgccttcaaaatcatttccagtgaatccatgcggctgacacccttcaaggcttccgctagttctggtgtccattctgaatgaacttcatccgccgtttggtgccatgccttagcgtgcaatcgggcactatcagcaatgacgccgtccaaatcaaatgcaaatcccttaatatcttcaaacttcatggttatccctccgaatagtaataagttgatgtgtaagttttagtttgattagcgggtaaaacaatgtcgccaaatccgtcgtggtgaatcgcatctgggaccgtttgtaattccacagccagtccgttatctggatgagcagcaagccaatccgcatctttgccaatgcaatcgggattgacgttaaaaataatgacgccattgcgatcactgcccatttctaattgatgctgctttgcgctatcaactagtaacaagcttggtgttacgcctagcgatgtatccggctttttaaaggcatcatcaaactgttcgttgccgccaagtttttcacattgatcgcccagcttaacaaggtttgtaaaatcaaacggggtattttcaacgacctgtatttcacccgttggaatcttttcttcatttaccacgatatgcctatccgcaactatcttcaagaattcatccttgattggcgcgtccggtccatccaaattaaagtaaacatgcgtcatcggattaaatagggtttccacgttgctgcgtccctcatattgtacggaaacatggttatcctcatctaaagaataggtgatggccatttccaacgtcccaggaaaaattgctttctgttgcatggtatatcgaattttggcagattggtcgtctagaataatctcgccatgccaattgagccgatcaatgcccgtgttaccactgtgtagcacatttttattttcgtttggcttcaaattgaccctgaatccagcgacgttaaacgtatggccgctcaaccgtcctgccacccgaccaatggtgtttcctaaatgaaagggattcgtttcatattcgtgcacgttatcaaaatttaaaatgatattcttctctggtgtcacaaagtagccagtccaggttgctccgtaactgattgtgcggaggctcacaccatttttatttgtaatcgtaaattctttgactaactcaccattttctaaatggccaaaatctttaacagtcgattccaccagtctcacccactttcttttaataaaaaaggcgaagagcagtttcccactcttgccctttttttagtcctatttaagctcttccttcttaccatcgaggtcaaccgtaattgggtcgccatcgagcaagtcaagcttcgtaccagactgatcaaccgttacctcaatcaaacgaccgcggaacaattgacggaactggtatgactgccatttcttaggtaggaatggtgcatagtgtaactcaccgttgcgaactcgcatgccagcgaatccttgaacaatggctaaccagccaccggtcatagctgtgatgtgcaaaccatcgaccgtgtcattattgtagttatccaaatcgagacgagctgtccgttcatacaattcggttgccttttcttcataatgaagatcagctgccaaaatggcatggattgaagctgacaaacttgattcatgaaccgttaatggctcatagaaatcaaagttggctttcttctgttcaggtgtaaagtcatcaataaagtcccagattccttgaagaacatcggcttgtttgatgtatggtgaacgaagaattttgtcccatgaccagttttggttaagtggcaattgatccttaggaagtgagctgactggcttgatatccttgtctaggaagccatcgtgttgaacgaaaattcctaacttcttgtcttcaggaaggtacattctgtccacaatgtcttgccactgtttcttttcagcgtcagtgacgtttaagtctttagcaacttctggtgcaacctctggcaaaatttcaagcgtatatttcaacgtccattgtgccaaaatgttggtataccagttgttatcaacgttattttcgtactcatcagggccagtaacaccatgaatcatgtacttgccattccgttctgagaagtgaacccggtcagcccagaaacgtgaaatctccgttaagaccttggcgccttcatgctgaacgtatgacttgtcaccagtgtagtttgtgtagttgtaaattgcgtaggcaatgtcgccgttacggtgaatttcctcaaatgtaatttcccattcgttatgagattcaatcccatcaaacgtaaccattgggtataaagcacccttaaggccctgttccttagcattatggaaggcaccgtcaatttgttggtaacgatacttcaacaagtttttggtaacatttggatccgtaacaccaaggtaaacgggaaccgcaaaggcctctgtatcccagtatgtggcaccaccgtatttttcaccggtaaagcctttaggtccgatgttcaaacgagaatcctcgccatagtacgttgagaagagctggaataggttaaaacgaattccttgttgcgcttcatcgtcgccagcaattttaacatcagaaacgttccagcgatttgcccaaacagctttgtgggcgttgaataaatcactgtatggtgttgcagaaatttctttatttaattgggttaaacgagcctcaagatcagcttgtttagggaagtcacgtgatgacacaacaactgtgcgcttctggataattgtttgctcaccagcagccagtgttccgctaaaatggttcgtcgctgagacatcggtttggtctgcagactcactgttccagtccgtgacaactgttgataaagcaccaaccgtaaattgtggtgttccaaagtcgtttggctttgtttccgcaataacttcggcttcattatcagtcttagcaactttcaaaacgtcccagaacttttcatcgtaattggcgtcttcattttgtacatcagcatcaacggatgaactgaattcaaccttagcttctttagaacccacattcttcaagataatcccttgaacaacgagttccttagttgcagcactgacaaatcgttcaaatgaaatctgaacctttgcgccacccttttcaacagtgaaagcccgttcgagaacggcctgttgcatatctaaatcaaggttgaagtcactcaccttgtccttagccaaatcaacaacttcaccgttgattttaatgccaaccttgataaagttgattgcattaatcactttgccaaagtacttaggatagccgtttttccaccagccaacctttgtcttatctggaaaccaaacgccaccaatgtagattccgggaagcgtgtcgccactgtaaccttcctcaaagaatccacgcatgccgaggttaccatttgcaagactggtcattgattcttgaagacgtttatcgtctggattaagtttagtggtcacaatgtgccacggtgatacgtcaaatgttcgtttcatcattcagactcctttaatttttatgcgaatacttctttaatactgcttactgagaaggcaccgactaacatcaagataccggctaagagaaccatccctggcattgatgagcccatcaatgggaacaaagcgaaactcaatactgaagcaacgatttgtggtaaacagatacttccgttgaatagaccaaggtacgagcccatgttggcacctgaaagtgcgttggtcaaaatggtgaatgggaacatcatcattgcggcccatgaaataccaatcaagcagaatgagaggatgagaacccattgattatgaacaacgaaaattgaggcaaacccaacggcacctaatactaaactagttgcgtacattggcttgtgcttgtcatttggcatcttagcaagaactaatgaccaaacaacggcagctaaagcgtaaattgcggatagaacaccgaaccagttggcaccggcttgatagccagcacttgcaggatctgttgcgcgccaaacgttcttggcgacggcacctgcaccataagtccaaaggtattggaaggccatccagcagaagaattgaacaagagttaacgtccagaatactttaggagcacgtttcaaaagtgtaaataaaccaactttttcttgaacatctgcttcagtaataccgtgataggcgttatattctgcgggtgtatattctttaactctcaaaatagtgaaggcactacagataactaagataacggcacctgtatagaatgagaaaataactgagttcggaatgacaccctttggcgcaatgttagcaacacccaaaccagttaagaggtatgggaaaattgcagctagcactgaaccactatttgataagaaactttggattgagtaagcaaatcctttttgctcatcattcaccatgtccccgaccatcatcttgaatggttgcatggcaacgttagacgataaatccatgaagagaattgtgatggcaccgaaccaaagtgctgcaagtgatccataaccaaatcctaagctaccagagtttggtagtaagaacataacgatgacggcgactaacgatcccatcaaaaggtaaggtaatcgacgaccaattttaggcatccacgttttatctgaataatagccaactaatggttgaaccactaaacctgctagtggaggaagaataaagaagaaacctaatttggttggatcagctcccaaagtttggaagatccgccccatttgtgaagattgtaaagagaaagccatttgaacaccgaagaatccgaaactaatcatccaaattgtcgcgatagacaattttggcattggcttggtttttggcgttgtagccgtgttgccttgtgctgaatcattttccatgatttgtcactccccgtttatttgggttatgtgaacccatttttcttaacaaaatgaattataaaccgctttgataatttgtgcaaccgtttgcacaaaaataaaataaaaaagagttgttgctcacaactcgtactgcacaattaatttttgaacatttcgatcggtaaataacaattctaccgcgcgactgcccagcatttccggccgcatatcaaccatgcggacatcttggtcaatcaacgctagtagctcactcttattgaaactcatcatcggaattttctttgtgtgtcgaattttgctccaaacccgattaaaccgcagcaagccaacatcgtcggttgcaattaccgcatcgacatcttggtgctgattcaaaaatacctcgactgctgtttcagaaacgcgttttggtaatctaaatactagcggttctaattggacttccgccatcgccttttcgtagcccattcggcgatttcgctcgtattgccactcatattcggattcaacaaatagtgggtttcgaaccccgccattttgaagaattgccattgtggcatctcgcccagcctgaacattgtcgttatcgacgtatcgatccggcaaatctccaactggctgaccaataaccacaaagtccaaattttcgcgacgcaaatagtcaacgaccggatcattctcatccgtatatagtagaacgaaccgtttgacctttgcctgttgaaccatggccgtcacgttagcaaggacctcttcaactcggctcccaatcgcaattgataaaacatagtgtcgggcgactagcgactgattgatgcctcggagcatatcaatatagaacggattctccggtgaggaactttccaccgttggaaaaataactccgacgacgtttgcttcaccgcgagtcaggttcttagcggtataatttggcagataatcaagatccttggcgagtttttggattcgttcacgcgttttaaggctaattcttgaattattatttagcgcacgtgaggcggttgagactgagacaccagcccgacgcgcaatatcttttattgtaatcatgagcgtttcctttttcatttattggcaagcttctccatctgaagtttaccacgaaatccctccatttaccgacaaattcaggtagaccatcgattttaatctcaagtaaaacttcaactttgaccaaagtcattctttcatcgcttacacaattacttaaggccctatacctttataaaatcctttcattgtgaaaaaattattttcaaaagatttcccgtagttactaatgtaagacagttttcacgaaattgtgtcgatttaaagtaaatgaaagcatttacaaaaaaaccagatgagtttatagtgaaaatgtaaactattggtaaagaaggggaattaagctgatgaggattgccatcgttaatgaaaactttgggcttggcggtattcaacgagtgtctaaagtaattggagatagtctaaaaaaaaataatgaagtatatttctatagtatcttcagtaatcaaaattattttaacgtacagcataactttattaatgggtcatttccaatattaaaaaatagctttttaaagggaactggtaaggctcgtaaggttattactaaatccgttttccataaagaatatagtaatgctcaaattaaagaaccatatttaaaaaaattattatcttttatttttggggctaatattgatgtggtcatcgttactggtcccactttaatttcatgtatagattacttaaaatcacatagtagttctacaattagatgggtagcttggatacacaataattatcatacttatatggacaattatacagttggttatcaaacagaatttattaatggtttaagaaatgcgacagcagttgtatgtttgactcaagatgatcgtgaacaatatgcgaaattcaattcgcaaactcacttaatttataatccattaacgattaataatacaaatatctcagatttgtccgcaaaaaaaatttgttttactggtaggattgcttttcagcataagggaattgattttttgctagaaattgctagtagactgtccaatggttggaaaattgaaattgctggtagtggatcaaataagcaagaaaaagaactaatgacacaaattaagaggcgtcatttagataaaaaaattgtttttagaggccctttatctggcaatagtttaaatcagcattatcttgactcttccatttacttgatgactagtcgttgggagggtatgcccttagtacttgctgaagctatgagttttggattgccaatcattgcttttaatcaatctggctctgcagaagttttaggcaaaggaaaatacggtatattagttgaaaatggaaatattgatgaaatggtatttcagcttaaacaattaatgagtaatatcgaaatgcgaaaagaatatcaaaatatttcactacagagaatacaggattttgatttaacaaagattacaaagacatggactcggttattagaaaggttgtaatagattatgaaaaaaatattaattgataattgtgtaccattaaataatggtgatgcggctctgattatgggactatttaaacagttggctaaaaaaaattatgatattggttttagttgtttagaccaagctagagtcaagcaagtctatccgagttttacttggtacaaatcacatataaacacattattttataaattatgctttaaaaataatttgtttgtgtggttctggaaaattgtgatgtttgtacgtctaatttggtttgataatgaatataaacgagcaaacattataatttctgcaccaggtggttatattcatagctattacggtattgaagcaagaatgtatattttatatttatgtaaaatgcatttacataaaaaggtaggcatctactcccaatcgattggaaacttaaccccacatgatcaaaaagtttttaaaaaatatggtcaatatttagactttatttttgcacgtgatgaagtttcgtataaccgagccaaagagtatggccttactaacaacttgactttaactaaagatgcagcctttttacttaaaacagatcaaaaaaatcttgaaaacaattctaaaaaaatagctatttctttgagaaactggacaaaagaaaaccgcagtatgaatagttatttttcacaaattaatgaagcagtatcttatttactagataataactatgacattactttcttatcaacttgtcagggaattgaaaattatgttgatgattctgaggttgccaaagcatttgttaagcactttaattatgaaaataatcagaacatacatgtcaatgatagctatcataccttaaacgacttgcaagcgttaattaggcaatatgattttattatcggcacaagactacatatgtgtttactagcttggattaataatgtgcctgcatttaatatatcctacgaagaaaaaggacgagaaagttacagatacttagggcttgatgcatatacaattgattttaatgcaacagatattttaaccaagttaccgaccttcctacggactgccaacaaaaaagaaatatttaatcgagtagataaagtctcgcaagaacaacaagcactttttgctagtttggaaaataacgactttgaaggggtctattgatcgatggataaatatcataaattagcaatgaattctctaatttttgcaattggaaatctgggtagtcgctttatatctataataatggtaccgttatatactcgttttatgaccactagtgaatatggtcaagttgatttggttacaactgctataagtttgttattaccaataatctctcttgccattgggcaagctgtcatacgttttgctgttgcttatagcgaaagtgacgatcgaaaaagaatattttctaatgctgttgccttaaatattttaggtacgctcctattaggattggtatttctaattttgcaaccatttcacctatttcacgggctacttgcttatttcactattttattaattttacaattatttggagataccatctcacaatttgtccgtggaatagggcgagtaagacaatacgctatcaacgggatactgactacaataattacggcaggtttaaatattttacttattgtgcaatggcaacaaggggttgacggttatctggtatcaatgattgttgctgctgctatttcagatttttatctatttattgttagtagaggatttaatttattttcaataagacatttaaataaaaaattattaggttccatgttaatttatgctgtgccgctcattccaaacagtatcatgtggtggattattaatggttcaactagatatcttatcctattttttgtcggagcaggtgcaaatggactctttgctgttgcaaataaaataccatcaatcttatctattgccacaaatattttttctcaagcatggcagctgtcagcatttgaagaacaagatagctctgacaaagctggtttttatacgtcagtttttaaaaattactatactgtgttgtttattggtgccagcataatattgattatcacaaaacctttaataatatatactgtaggacaacaattttcatcaagttgggaacttgtaccatttttattgttagcaagtatgtatcaaagtttttctggttttttaggcactacctatacagcttcactacaaacaaaaggtgtcttcacaacttcgattttagcggctatggtgtcatttatagctaatctagtcttattaccaatcataggggtctatggtgctggaattggtacttgtttaggatttgtggctatgtggtggattagattaaaagatactaagaagataattggtttaaatgtcaacttaaaagagtatgctcttttaaatatcgttttttttattcaaacgggcattatgtatttatttaataattctacattggtagtggctgaagcattatgttttatattaatgtgcctagttgtccatcaaaatttgtattcagtaattaaaaaagttctaaaataatatcaagatagaaagaagtatgagtatggcacacaataaaaataattatgttgattattatagaatgtatggacgttttagtctgaaatggcagcatcgtgtattcccttgtttaattccaccccaaattagacattttattttaattcgaaaatggcaaaacacacactctaatttaaataagtttttgttgaaaacaaggatgcattttttacaaaaaagatcgtttattgacataccaccacaaacaaaattaggcaatggattatctatgtaccatactggattagtcattgttaatgacaaagcaattattggtaacaatgtgaccctttcaccaggggtcactattggcaaaacagctaataaaaagggagatggtccaggatatccaaaaattggtaatgaagtatggattggtactaatgcggtaattattgggaatgttacaattagggataatgtattaattgcagctaactgttttgtaaacagaaatgttccaagtaattccgtggtttttgggaaccctgcaataataaaggaagggaagcaaaatgcaacaactggttatataagaaatcgagtttaaagtctgttgtagctacgctctatctattaaattgaaatggagaactaaaaatgaaaatttcagtatttggtttaggatatgttggattagcaaatgccttgcttttgagtcaaaatgaacaagtcaaagcttatgatatcgtcgatgaaaaaattgagatgcttcagaaaggcaagtctccaatagtagataaagagattgaaacttttttaaagcgcgatgacttgcaaattgaatttacaactagttttgaagagtcagttaagtttgctgactacttgcttattgcaacgccaacagattacgatgaagaaaagaattgttttaatacttcgacagtagaagatgttattcaaagggctttggatattcgttctgattctacatttattattaaatctacagtgccagtaggttacacagaaagcattaggcaaaagtttggtacaaataatattattttttcaccagaatttttacgtgaaggtaaagcattatatgatgacctatatccttcacgaattattattggtgaagactcagatcgtgggctggaagttgctaacatgtttaaagaaaacacattaaaagaagatatttctgttttacgtgttcattcaacagaagctgaagccattaagcttttttcaaatacgtatttagccatgagagttgcgtactttaacgaattagatacatacgctttgagtcgtaatttaaatgctaaagaaattattgaaggtgttggattagatcctagaattggctcacactacaacaatccttcatttggttatgggggttactgtctacctaaggattctaaacagttacttgcgaattacaacgatgttccacaaaatatcatgacggcaattgttgatgccaatcaaaccagaaaagacttcattgcagatcagattattcataaagttcctaaggtagttggtatttatcgtttaactatgaaaactgattcagataatttcagacaatcagcaattcaaggtattatgaaacgaattaaagcaaagggtattgaagtgatagtttatgaacctaatttgaaagatgaaaaattctttaattctgaagtaattagaagcttatctgattttaagaaggaagcagatgtgattgtttcaaatcgaatggactccgatctaaaagatgttaaagataaagtatatacaagagatatttttgggaaaaactaataatatattttttaagtattgcttttatggtagattgcaaatttaatccgaattttttgacaaattggtcaacataacctggtaaggtgtttgccagttaagtactttaagggggcgctggttaatttcgagtaacatcgtggttaaatcttgagcactaatgtgctcaaaacaagtccccttagggtaaaaataacgtaagttccgattaaatcgtttattactgccgcgttcagctggtgtgtaagcatggcagtaataggttggaataccgtattgtgatccaaatgacactagcttgctaaactcagtgccgcgatcgacagtaaagctgtgtactggccccttaaaagttgctaggaacttcattagggcttcattaacagctgctgctatccgatcttttaattgatacgcccaaagaaaacgtgatttacgatcaagtaaagttaataaaacgaccttactatgcccgcgagggccaaccaccgtatctatttcgaaatcaccgatgcggttacgttggttaagcataattggtcgttggtcaattgaacgtcctaatgattaattatatttagaacgttggtcaaggttacgccgttggcgtagaccatgttcaggtaggtcacttaaagaaaattcaaatttcccctgatatagccaattgtaaatagatttagtagctagtttaagttcatgagcaatcacttctggtgaccagcttagacgtaagtggtttagaatgatttgctttaatttggcattcaatttagttttccgaccacatcgtgcccgcttagattcagcgttcgcttgcgccaactcagcttgataaggttgacagcgggataattcataagaaatcgtggacggcgatcgttttaactgctcagccatttgggcattggccagtcctagttcacaaaaggtttcaattttaattcgttaagaataggttatactagacaaaagatcagctcctaaaaaatggatttgtggtaaacaccattttaagggaagctggtttttttgtctgaacagcgttcggattaattttacaatctaccataatgattaaagtgtttagatagagtaaagtggggccataacttaataattgtggcctgctttttttaatctatagctgaaagtggcaaaacatcataatgtatgcttataagccatttattaatgtgagtaacgaaattagtagccgtaagctattaacgaaaagcttcgttaactcattttttaggctaattgaacgcaaaataagtaacctaaatattaatcgcatcagtatctctaaactgaagtcctactcgtgatatgaaatccttaagcagatcaaacaatccctcagacctcactcaaataatcgtccgttaaaaataacgagcgtgtgctcagatgacgcttatttaacagctataccagccgatctttaatattaattactgtctgcaccgacacaccggtttcagctgcaattgcacgatagctaattggggcaccggttgctttgttgtaatacactctcctataatttgcgtgtgttcgattatttacatatattttctattggtcgagcagttgatgtctcaaccaatcaacagtgactagtataactagtgagtgttgcagtgcaataatcagaacattacgtttttagggggtgcttgtaatataaggccgtttttgtaatgaattgtaatatttggtagattgtatcaacattactagaataaaagtagcgggataaatatttcacgaccaaatagtatctaaatctatacgttcaacaccaagcaatcacacaccacaacacagcacaccgtatagaccctttaaaacgtcttctaagcgattttaaggtgcattgcttaattatatatggcgaattgtcaaactaagtgcaacggtttgtcaaaaaatacttcatatggggtttcatagtttaacactttgcaaggacgttgatttaactgcttttggcagtgttcaacgtcctgttctgtataattatcaatatctgttcgcttgggaaaatattcccggattaatccatttgtattctcatttgttctacgctgttcaggcgaatatggatcgggccaatagacagtaacacctaacctttcgctgatttcatcaagatgaagaaattcggtcccatgatctggtgtaatagaatgaacaaattctttaggaatggcccctaacagttcaactaagcctttatttatctcctgcaagtccttttgcacaacctttttgataagcgtaagccgactaagccgatcgacaaccgttaaaaggatggagtgacccgttcgaccaatcacagtatcaatttcccagtcacctatacgttgacgctggttgataaaaccagggcgctcatggatcgagatatagtcggtctgtacttctcgatgtcgtctagtattctttgaatgccgagtccgatgtttatgtctgagatggcgctgaataccggtatcaccacgtgaggagtacttctcacctaaattgtgttgatagatatgacggtaaattgtgttgtagctaacacaccattgatgttccttattaaagagagcggtaatctgctctggtgaccagtgcagatctaagatgtaatgaacaatttgacggcgtaattgtggatggctgtctaatagccgcttcttgtgacaattctgccgcttttgatgatagtcattatctgctttgcttggggaataattacctgcacaacgttttaactcccgtgaaatagtgcttggatttcgccccagccgtaacgcaacagcccggatagataaccccttagttcgtaaaaacataagtatttcacgttcttttatagtaagatgtttatagctcataccggatacctcgaattgtttgatttggtcgttaaacatattctacccggtatgggtttatttttttactttgtgttgcatttcaattgtaaattcgccctattaaaaaaattctaatcacgttctaaagctggagacttttaaaaaaatcaaaattttgatatagtggattatagtacttttaggtaaccaagaagtttttgaacgccttatgaaggttgagtaagatgaaattggttggatatggtgctaatttcttggtttagaacaaattggtgaatataaaaaatataaattttattttgactcattcatagcgttatacaccatgtctacccaagcgcgtggcgcatgttacccagattattattccttatgaataataatctgggtaacatgctaatacatggaggtgtatgttggtagaaaaagttaaagttaaaaatgtaactaagatttttggaaagcaaatatctctagcaaaaaaattgttgcgtgagggaaagtctaaagcagagatcctttcgcagacaggttgtactgttggagttaatcaagctagttttgctgttaatgaaggtgaactgtttgtaatcatggggctgtctggaagtggaaagtctacgattatccgaatgatcaaccgcttgataaattcgactgatggggatattgaaatcgatgaacaaggtgtgatgggcctcagtaaggaagaattacgtcacttgcgccaagataagatcggcatggtttttcaaaattttgccttgtttccgcataagtccgtattacaaaatgcggcttatggattggagcttaaaaagtttccgttagatgtacgaaacaggaaagctcatgaagcattgacactagtcggcttgaccgggtatgacgaccaatatccagatcagttatcaggcgggatgcagcagcgggttggtctcgcgcgcgctttggccaatgatgccgagattctgttgatggacgaggcattttcggccttggatccgttatatcggaaagaaatgcaggatttgttattgcaaattcaagaaaaaatgcataaaacgatcatttttattggccatgacctgaacgaagctttgaaattaggggataggattatgatcatgcgtgatggccatatcgaacaaattgataatccggaagatattttgactcacccggctaatgattacgtagaacgcttcatcgaaggggtcgaccggacaaaggtcctgacggcaagtagtgtaatgacgcaggcccaggtggttaatattggaaaggctggaccacgggtggctttgcggagaatgcgagccaacgatatctcttcaatatacgtggttgataatgacaacaaattcgtgggttttgccgatgcgcatgatgtttcggatctgattaagaagggcagtgaagacctgaagtcagttcttaggacagacgtgcctaagacaagtgtggatatgccaatcaatgcattgattaacgatatttcgaaggcagcaattccttatgtcgtgttggatgatgacgatcatctactaggcatcattctacggagttctgttttggcggctatcgctggggaagaggtgagtgcttaatgaatattggacaaatacctttagcggattggatcaactcaggtgttgactggctgagtcaatttaccggattttttaatagtgtgacgatctttttccaggtaatcattgacggtattcaatgggcttttgacttcttgccgcaatgggtctttatcttggtggtcttagcactcacgtactgggttaaacgaggacaaaagaaaattagtttcatggtgtttgaagttttggggctgttattgatctggaacttaggatactggcgtgatatgacccagaccttgacgttagttttgtcgtctagtttgattgcaatcgttgttggtattccacttggaatttggatggcaaaaagttcaagagctgagatcgtaatcaaaccaattcttgacttcatgcagaccttgccagcgtttgtttatctaataccggccgtttcattttttggtatcgggatggtaccgggggtgttggcttcagtgatttttgcgacgccaccgacagtgcgaatgacaaacttgggaatccggcaggtgccaagtgacttgatcgaggtagcggattcctttggctcgaccagctggcaaaagctaatcaaattacagttaccactagcaaaaacaacaataatgtccggaattaatcaaacgatgatgcttggactttcaatggtcgtgattgcatcaatgattggcgcccttggtttaggaactcaggtttactttgctgtggggcgtaatgatgccggggcaggatttgccgcaggaattgctgtggttattgtagctattattttggatcgaatcacacaatcgttcaacaaaacatccaaataaagggggaatgattagtttgaagaaaagaattctccgttatttgcaaatggccacagtgattatatgtttgacagccatagttagtgcttgtgctaaaccagctgaatacgactcacataaaaagttaggaccgcaaatcaattatacgattacagggatcgaagctggtgcgggtgtaatggctaatacacaaacattgttgtcaaaatataagttgaaacaggctaactggcagatcatgccaagttctacagctgcgatgattagcacgttatccaaggcagttaaaaataaacagcctatcgttgttactggctggcagccacactggatggttgctaaatattcgttgaaatttttaaaagatccaaaacatgtttatggtaatggtgaatcaatgcgcaccattacacgtaaagggttggaaaaagataatccaggtgctactaagttactaaagaatttccattggacaatttcaatgtcaaatccagtaatgctgaacataaacggtggcatgaataagcaaaaagctgtcaatcagtttattaaaaaccatcctaaacaagtcaaagcatggacagcgggggtgccaaacggtcatggcaaaaaaattaaattagtttatacaccatatgactatgaaattgcgacaaccactttagtaacgactttgttgaagcaaaaaggatataaagctacaatgcaacagttagacgtgggagttatgtggaattcgatagctaatggtagttctgacgcttccgtgactgctgagttaccagttacccatggcttgtatgccaagaagtacaaaggtaagtatgttcaattgcgcaaaaatttgaagggtgctcaaacagggttggcagttcccaaatatatgaagaatattaatactgttgatgatctaaaaaacaaatgatattggctgtaaaatttctggcattggaccacaccaatgccagtttttttgttatttgtcatgtgaagttgatggaatccttatgaagtatctggagcttaattggtctaggtacttttttataccgtcacagtttgacgtgctgggtgaagccattggcgttgaatcttaatacggttgacaaagttctcccaattacggaagccaaaagcagtgtttttaatctcccgaattgtcaaattaagttagaaattttttaactgttcatctgtaatctgactgatgaatgcttccagaggtgtctggtaacccaaactttttcgtgggatgtggtttcgtcgactggcaactgcttgaacaaatccatctgatagctggtccataataagattgtgacgtaaaccatctttacgcagcagaccattggtgttctcatttaaaccacgttgattgggtgctccgacagcggcaaagtaaatatttaaatcaaattggttagcaatggttcgccaaccggcgaactccttaccattgtcaaacgtaattgacttaaataggtgtcgtggcagcttcgaaagccatcctgctaaactacgattgacatcgtgtgccgacttggtatgcgaattcagcacaattgcgaccttagtttgtcgttcaaccagcgtggttaccgcaccctgatggtttttaccttgaaccgtgtcaccttctaaatggccgaattcttgattaaaattaggatagtcctgataacgattctttaaatccctgcccaattgacccgctttcccacggcgttcaatgtaaccattagggtgccgtttgccgtgcatcggtaaatctttggtcgacaaccccaaaacaccgcgtttgaaaaggcggtaaagggttcgaaccccacagctgaaagcccgttcttggcgattaataatggtatctggttgccaaccagcttgagttttggcttgaatataggccagttcatcagggcgtagttgaattggtttacgcccacaatgttgtttatgctttcgatagtggcattggtaatcaataatcgtaccgccagcgtcaagaaaccgataaatacgatacacagtttcagcactccgatggagcgctggggccactagataagcctttttaccgagtttccaaaaagaataaattgtggcaagttcgtctatagtaagatgagtataggtcatttgtgatcagcctttcttttgattttgacactcaaaagtctatcacaaatggtagattgtaaaattaatccgaacgctgttcggacaaaaaagatcagcttcctttaaaatggtgtttaccacaaacccatcttttaggagctggtcttttgtctagtatagcggtgtggtcacaaagattggggtctcaccagtcgaggagagtaaagcgactttttatgaagtgacagcggtcgttccgattacagccgatcaggcacagttactacgctacgggatgattgggcaaacggcgattattacgggcaaggtgacttggtttgattattataaagataaggtgctggataataattgatacctgttgtgacagataattgcagaatgtaatcaatccatgtaatggggccaatggaacacctatacgaattttagcggtaggagaacgaacaagttaagatcaattactgaagtgaaagcgtctctaaatacttcgttaatcaaaaatactttacgtgattatcttaaaaaggttgggtggttaagcaatcttgtttgactagtcattttcagtatattaaattttgtgacttttatcagagaagttgatggtgctgaaaccagtcaaatgccagccactaaattagctacttttattgtgctagtggtttcctttatttttatcgtcttgatccaacttgtcttactgccatttattaagcatagaaagtaaaatcgagtttcggggtccattttacaaacaacccctcaaagaacattgttaaaataaccttcaatatctatagtgtagatgttggggggttattttaatgttattaatttgaattacccatataatcagtcctttttgtgcttcaaataaatcgttacaaaattaatccaagcaactagggtaccgactaaaaataagaataacactgaagatctcagactaatctcagattcattaacattattagttacgttaacccaggcactaaatcagccttatcaaggcttgaaccaacaagttcagcgagcaactagtccacaacaaaaagtgcagtttaagaaccagttaaatgatgtacaacaggaaatcagcaatcgaactcaaaaacaactgcaagcatttgctgaacagaatccggagatcaaacaacccgaacccgaacttgatcaaagtctaaaacgttggccagtttttaaaggtcatgctataatgtagacagaaaaaagaagccctgctggaacaggacttcccgtgcaagccgcttcaaaggcggtggcaagttattcaaacgataattttgtcgccctgcaacctaccaaagttgagcagggcggcttttttatttgttccttttgtcgatgtatgttaacaacgctaaaacaaacattgcaaacagcaacatcaacgagagtgtctggaagacgctcattgactgtgaaaccttcctgaagattcttccatgttcccatgggcctcacctcacaaggaaaacgacagccatcgcccttaaaacattctaagctttatagtgaatcgattatccgacgggatagttgattcactattttagttttgttctaaactttaaatagtggtgaaactatatgccgtaagaagtttagacgcttgacgtcgtccttaaaacaggcaattttacttagtagttagtattctcttcgaagaatgtcgacacttgatgtccagtttagaaaattagaaataattaccttagtaaatacgttccaaccactaacagctatttaggagggtttaaaaatgagcattgtctttggcatagatgtaagtagtcgtgattccagtgtttgtgtacttcagagtggcgtcacacgagaatataagatcactaacgatactatcggctttaaaactctattgatagatctaaaagaatacgccgaacatccacaaatcatcttagaagcaactggaatttattcacgcagaattactagatttttagatgaatacgattatgattatgttcttcttaatcctttaaaggctaagaaagaaattaatcagggcttacgtcgcaataaaaccgatcgcaatgatgcttaccatttggcactagctcaagatcgaaatcagcatcaacctaatcgaaaagagcctgaggcttatcatcaattgcaatctttaagtcgggcttatgaagaattaactcacgatattgtttcttccaagaatcgacttcataaatatttacagttaacttttccagaattagaaaccattttcaataactctagaggagttaattactggtatttagttgagctctttccacactgccaagatgttagaaatcttgacgtatcaaccatcgctaagcaaattaaagattttaaaggttatggtattaaccgtgctcaaaaactagctattaaacttaagcatctcgcggatttagcttatccagcagtcgatcaagacgacccagagcgtgatgaagtggtttattacgccaatagattattacggcttacagctgatcgcgagcggagatcagaggcaatgattaaattagctaagactttgcctaatcgtgatctagaaatcttaatgagtattcctggtatcgctgaaataactgccgtccgaattctagccgaattaggcgacattagaagattcagtaatccaaacaagataaatgcttttgttggtattgatccaggtagatatcaatcaggggaaaaagattctagtttaaggatctctaagcacggcaatgctgttgcgcggaagattctttatcgtgcaattggacaaatcgatctagcggctaagactagtccatgtcatatagcagattactatgaacgaaaaaagcaattttctcaaacaaaggggttcaagaaaattgccattgcttcaatccataaattgcttagaacggtctacattttgattatcactgatcaaatgtatgattacaacgtagccaacaataatcaaaaagacttttgtcgtaattaattgatcatgttcattatagcctaggttaacttcaaagaagtaatttctttgaagccttttgtgatgctccaaatttaggaataaaacgccccgattaaagcaatgatgtcaaatatgtcagaaattaagactttagagtcctaatatacttgactttacgtagaaaacttcttgcttggtctattatacaggcaatttacttaatgaccaagctctcaacaactattagagcaattatcaatgatggaggggatttttttaatgaatgcactcatttttcatgggtcagcaccgcatgctacagcagacaagttttggtataaaaacattgctcatagtttaaactctttaggaatatcaacaattgtggcggatttaccaaatcttgatcaagaatcgctaacagatacactcgttaaaattagagaaatgaacttaggcattaatcaaaacacaattttaatcggccattctgccggaacaaatattatcttagctttacttgaacaactaacaaaaccagttaaagctgtctatttgattgctggctattgtcaacctaatggcatgcgtcacacaaccttaaaaaaatcctatgattggaagacaatcaagaagaactcaaatgagttttatatattcaattcatttaacgatcctttcaattgtaatgaaaagcaaggaagaagtttatttgaccatttgggtggaacacttattttaagaaatgatggtcattttacccaaaaaaagctgccattattaatgacgctactgcaacaatactaatccccccccctttagaaaagtatattaaacggccactagggtatatcctaatgactatttatacttagtgctatacttagttttataaacatccatagaattgtccaaaattgtaaggatgagttgcgctcagatcagttccaatgatccaaatgttagtaatgttgtcctaaaggtactgatatttggcataacgggtaagtattacctgaaaaattaggagggtattcatgaattttgatgctgtcggtgacaatgtaagaggtcttttaactgcgacaagatcttatgttgttcctagatttcaaagagatttttcttgggatgagaataattataaagagcttttaaatgacttattatcacaaataacatgtgacgacaataacggcgatgttatagaatttaaaacatctcaatattatttaggaaatatgattttcttaggcacaaaagataaaacatcggttgaaattattgatggtcagcaaagattaaccacagggacgattttattagctgccattcgtgattcgctatacgctgcctcaaaaaggaaagatgatctggctttcagttatgccgaaactacacaaaatgaatacttagtaaaaaagatagatggttctcctcaaagaaaattacaaactactagtagctatccttattttacacaaactatacaaggtggtgcagatagcgagacttctatggagccatcaaacgatgaagaagaagcacttaaaaaatcttttgaatttttcaaaaagcaactaagccaaaataaacttttcagtaagctaaacatagataagcctcacgtaaaaagtaaaaaagacgaattatttattaatactttgaaagctataagagatcagtttttaaactctgaaattgtcgaaatatttgttgcagacaacaatcaggcacatcggatatttgagaatattaattcaaaaggtaaaccattgtcacaagtggatttgataaaaaatgatatatttagtaaattagaaattaatgatgtaggtgtagattaccccactcaacagtggaaagagatcaatcttgtattatctgacctagacacaacatttgatgaatttttccttcacttttggaaatcagaatatccatctgattcggctaatggctctaatctatataaaaagtatttaataagatttaaaagtgatgatgaaaatcatatttcacttaaaaaatttgtgaaaaagttgcaggaatcagccaaaacgtacgcaaatataattaatccattaagagacgattttaaaaaacaagaaacaaaaattgtttaccaatccttagatgctataaataagttccggggtgtacagtcaagggttgcgttattatctctattcaatagtggtattaaagtgaaacagaagaagttaaataattttctgtttttcctggctaattttcatatggctgcttttggaacagatttaaaggtacgttctaatttaactactaataaatataaaagcttttgtcaaaaggtcaataatgctaaaacacccgaagatattcaaaaaagtatgttagctctcgaaaaatcattacttgatcttatcaatgaggatgatttcaaaaagtcttttgtaaaattagtgttccagaaagataaagcaagaaattcaatgagtagctatcctgcttcctatgctataaaggtaattgctgataaaatggatggcagacaatataatgatgatgactattcgatcgaacatatattagacgaagcaggtaaccgaaaatccttatcaaatattggaaatataagtgttttagaaagaaagtacaacgatgaattatgcaacattaagcctaaaaatttccataacaatattgattataagattgacacctataacgaaagttcttataaaatgatcaaaagcgtatccaaaggttttaacgaagaatctataccaaaacgggcacaaaaattagctgattacttttggaatgaatttttaaaaatagaatgagtgttttcccatggtgaagaccaatattcatgttgattattttagataagaaataggaaaagcagggttatatgtattgataaattatttaagatgaaagcggaacaaaaaaatactgacgaattagaagcaggtcgattttatagatgagcttttaacaggagaaaggcatgtgccacaacttaacagttgtggcctcttttttgatgcaattgttcaaaattgttcaaaacatattttgatgatcttcccttgccaatggatgtaagctgattcctgagacaacttttaagagagggtataatgaataaatcatctctcaaaaggaaggaatttttacatgccaactcgttacgacaaagaattcaataactataagcaagacgagcaccaggagttatcacccaagggtgattaatttcgaaaatttgaatttcagttgctaagtaaagtggcgtcttaccatgattaaaagcaaaaacgggttgcggaaaatcaggcttactagcaacctgatgaacactttgacgagaattcatctgccaacgaatttttaaatcttcacgcgacaataattgtggcagctgtgttttttcaatttgagcttgttgttgcaacttttgtgtaaactcttgtttagtcttgttttgatgccaatcatcaaaaagatcatacttgtttgatttaaaatctaaatccataaagccagcctcctaaccaaaatcaattttatccagcatcgtttcagtactagcctggtctaagcctaaataagctaaagtcattgcttcactggaatgatttagtaaattcatgactaagccaatattataatttgattgcgtgtaaacgcgataagccccggttttacgcatcgtatgggtccctagataattaattcctaacagatcgccaaccttgctcatgattttgtagaactgtttttccgtgatatgtcgttctgggtgctgaatcgagggaaacaaccagtcagaaaccaaatggttttcttgcaaccaagcttgataggctaataaatcagtttgcacgggttttaagtagagcaggttagctttaccggtcttttggtcgtgtataagcgcattctgacgcacggtgccgttttcgttaaagacatctgtccaacgaagcttcataacgtcgctcactcgcaacagagtcgctttacccacttgaaaaacggtatagttacgccaaccagctttgaaattatggagtaacgtatcttgcacttctttgagaacatttgaatctttgatgggtaagacaatttgttgcatagttttagctccttaaaaaattgatttttagtacaaattaaagtacaatattaagtacaatgaaagggtggtaaatatgacattagcattaacacagagcgattttcgcgctaacctaaaaaaatatttagatcaagttaatgacgaagacgaaaccgtttatattgctcgttcaaatagtcgcgcagtagccatcgtttcacaagaaaaaatggactggctagaaagagcattaaaagcgaaagaaggttcgttagaatatgcaattgcacgtgatcagttaattaaacgccatgttttacctgacgatgaaattgttgaatcagatgatgattattggggtcagtttaaataatgaaaaaactaagatttaaaccacgtgcaacctttaatgctgacctaaagcgattagccagtttagataaaactattattgacgaagttcgagcagccattgacctattgctcgaacaacaacaattaccaccagaatttgaagatcatgagcttaatcggcgaatgagcggttataatgaatttcacttacgagataccccgaaaaacaaaacaccaagcgaaactaacgatgtcctggtggtttatacgattgatacagatgaactagtcttaattggcattcgagtcggatcgcatgatcgtttatttcctggtcaaaatcgtgctaaaaggtatcgaaaaaatgacgaataagagaagtcatttataccatataaaaacaaataacccccaacatctacattatagatattgggggttattttaataatgattttgagggtctatttggtaaaaatgggcccttaaaaatatatagcttacttgatcttcccattttcctggaagatcttttttgttcgaaaataatccgacaaaaatttgttttcttgtttttctgtgctaaaattaagccgtctactcgaacgtgtgttcgaatattgagcaaataatttttaaggaggttgaatcagaaactgcttactcatttgatagcttgttcgttgtaggcgcttatggttgctaaacaacacagaaaggacgatttatgtatggatgaaatggtaaaagaaacacaagtctggctcaacaaaacttacggtaaagtttctggctttggtaaagtacccgaggacggtaatactggttggaacacagtttatgggttaactagagccctgcaacacgaattaggtatcacagatctagttgataattttggcccttcaactgccgctaaatgggatactcaatttgctaataaagttaaaactggctttaagcacaatgttgttaaaataatccaaggtggcttttggtgtaagggtatcaaccctgaagactttaccggagaatttactactaacacggctgctgctgtcgttgaattaaaaaaagacgccggtatcaaagacaccagcgccaatgtaaactcggatattatgaaagccttgttgacaatgagcgcgtttgttttagttcctggtggggacgctaaaatccgttcaatgcaacaacagcttaatcatgattatcaagcttacactggtattttaccatgtgatggaatttatcaaagggatacgaacactgctttgatttatgctttgcagtcagtggaaggtatggatactggaactgctaatggttattatggtcctggtacgatcaataaaacaccaactgttaattctggcgcaactggggcaatcgttaaaattattcaatatggtctttacgttaatggtttctattcaggcgccttcaatggccaatttacacaaaatgttgccgacggtatagtttcctttagaaaattcatgaagttgcctccttatacttcaactgctgacctaactgtgatcaaaggcttattaactagtaatggtaacactaaccgatcttcagatggtgtcgacatggctactcaaatcacatcagctgctacggctaaatcactgaaagcagctggctataacattatcggccgttatttgacaggaagcgtcgggactggtgctgataaacgagataaaaatttgactaacactgaagttaaactgctattagatgctaaccttaagatttttccgatttacgaagatggaggttatgaagaaagttattttaatagcaagcaaggtttcgcagacgcttctattgccgttaatactgcacgtcagcttggcctaccaagtgggacagttatctattttgccgttgatgttgatattcaagatggaaacatgagtagtacggttgtcccctatttcgagggtattactggtattataggatcaactgaatataaagcaggtatttatggaacacgcaatgcgtgcttgcatgtaaaccacttagttaagtatagttttgttgctgatatgtcttctggatggagcggaaatttagggttcaaaatgcctgaaaattggagctttgatcaattcaatgaatttactggagcttcaacagggattgatatggatcaagttgctgtctctggtaaagataacggagtttctaaagttaccaaagttaatataaatcctaacgctgctttctttacccaactgcaacaagtagaagaccaggcatatagttatatcagcggtgaaagctcttcaacacctgctgaacaacttgttacccaattttatagacaattttcctattcttcaccaagttgggcacccttggccggtggattaaatactagctggttagcattcgcaaactcagcattacatgtttcaaaagaaagtgacttcgaaactctttatgatagtactactggcataaaaattggcttaccacacatgatggcttctttaaacgcacttttattttggggagaaccacagtcagcctcaggaattcaggaccttgggggctggtgtggagatcttttaacaagtatagaagatgctcatcttaaccagaaaaaatacggctctttttatgaatcaattactgcatatgtaggtaataaagggcaatttggaagggaagatttggttgacgatttggatgcacttaacgtttacagtacaatccattcgcaaaacaaccaaactatatccaaaattattaaaacttattacaccggtaatgaaagctccgttcgctttaattcttacctaagtaatcgttttgatgatgaccttgattcactacagaacgacacatatactcttttaaaaggtggtacaggttcatggggtgcagcttataaaaccgctttattggcttttaaaaagtttaaattacaaaaatatccttcttatactgacagtgaagcaaaagacgccgctaaagcttttcgcaagttaattgaacaaaacgtatagaaagtaataagcaaaatgataaactatatatattagtttatcattttacttattttagttttttacttttatctaaaaaatagaaagaggtgctaaatcagccttgtactcatggttaatcgtaatattagttgttttttttctcataacaattgattttttatatttatgtgaccatataaatgatactatcattgaaaatggctattttaaaaacattcttacaattattatttcaattttatctagttggttcatctccaaatatttgggccctttttttctaaatttcacttcagaagttggagttaccaattcattcggctttatattaataattgttgcattaataggcttttcactcctattcaacgctgcaaggcatgacattgtaactaggaaaaaaactgtacagcaggctcaaaaaaaatacttcagacacaatcaagtcctaactttttctatggttcattacgtaatcggaataagtagtgttgtaatagttaatagcattgtatatttaccaatcttcctcgactttttaattccgattcccaaaagttaccctggtaacgttgaaaaaattgaactccaagaattcattacttttattattactcttgtaatgccttttttaatcatagtttttacccccttttctttgaaaaaattactctcccatttcaataaatagggtccattatctagattttcaattataatactcatacgcgtggtgctagttaaatttagacagtaaaaaagcctgacggtttacacttaaagcaatacacagtaaagaggtgttaagcatatcagactagtttaagccttatcagccgggaatgagtgatgttgatattgccgaagtacgtgattaagccggccaaagccgttacgttaattatttaataaattgtttatttatttgcctaataatgatataattaagctagatgaaggaggtatcgagatgaagattattacttttactgctatcaagggtggtgttggtaaaacaaccttgactttaaattatggtgattggttagccaaacatggtaagaaggttctattaatcgatttagaccatcagtgcaatttaacaaccgtttttgaaaagacacgacgaaacaataccatcgctgaagcgtttaaagaaaatgacaatgctcaaaaagtaaaaattgacagtgtcggaccgaatctagatttaatagccggttttatagacctagatgttttaggaagttatctagaaaataacagtaacaaagaaatgatgttgttcatgtggtttaaaaacaactccgattcattaagcttaaccgactatgactatatcttaattgatacgcacccagattttagcaccatcactaaaaacgctattgctatcagtaattacctgcttagtcccattacacccagtgaacatggctacaatgccaagtttgacctagaaacacgactcgaaaaattcagaaaatcactttttgattatcgaactggcgaaacttacgttgacgcaaagcttttctttattggtaatatgattagacataatacaagcatgtctcgcgatttgctaaaacacatagaaggcgatgaaacagtcgcaactataattcctgaaagagagctctttaataaagctactgcaaggcacgcttcaatatttgaattagccaatcatgatgaatccattttaaagcaaaatcaaaagttcatagaacacgccgatcatctttttcaagaattagcaaataaaaccaagtaaggagagttagattatgagtttagattcattcaatcataaaaaagacgaagaaatgagagaaagttacgaaactacattgaaagacaacaagaaagatgcagtcgcatttttgaaaaatatcagccgaaaggaagtagagcgtaagcgatcagtgaccttctcaattactgaaagtcaacttaaaaaaatggatacggctgcccgaaaaaacggatttaaaaatcgttcagaattcttagcttcaatcatagatgcaatttagcaattaaataaataattaatcaaacaagtaaatacacaatttattttcttgattaatttgcgcttaggtaaaagctagtaaagtgcactgaaccaaatacggttgcctgtaagtaagcgctatgctagactaagattaatttaacaaccaaataaagagatcaagctaaacagaaaaatccccgattcacgaggaatcggggattttaggtttagcaagtagctaacagagagctacttagattcagacaatttagaccgccaagttaaaatcgtctgaacattgttcttaatttgtaggttaattataccgcaaaccagtcctatgggacaagtgaaggatagttaaaaacaaattaaatccaatggactaagtagctaaccaatgctatttagtccatttttgttgttagaaattaaaaaaagttgccgtataggcaacccagaatagacacatgccggtgaatttacaaagccgatcacgtccaatgttcgctttgtaattcagttaaagcatatcagatttgtattttaaaacaagtcaggtgttttagcaactctcttttaagacggcgtgtgtcagttaagaaagggagcttttattatggatcaatcaaactttaactttacaaatgctaaaagagcctatgaagtaaagttctacgctttgccgcagatcttactccaaggagaaaaatataaggatcttagcgatagtgccattttactttattcggtgttacgcgatcgtctaagttactcactaagcaataattgggttgacgaaaataacaacgtatatttcatatacacaaacaatgaactaaaagatttacgaaactggtcaaataataaaatcaataagattaaacacgaattaatggacgcaaaccttttgtatcaaaaacatatgggttttaatccaagatcaggcaaaaacgaaccaaatagattatatttggcagatttggaagtaacagcaaaagacgtttatattaagcgagagccaataaaatcgcctgaatcccttggtacaagcggacttctcaaaaagagaaacccgtatgataccgttgaaccccttggtacaagcggacttctcaaaaagagaaacccgcatgataccgtttctgatacgcctgaatcccttggtacaagcggacttctcaaaaagagacaagatctagactatactaataatttagatactaatagatataatatagatactcaaaagttggacttttccacagcccaattctcaccagcagaactagaaaagcaaaacaaggatttggtgaaacatgctaatgatttcttaactgatgaagatagtggcttaccggttttcttagaaccagaagccgtgcaattacttagcttctggtgccgtaccccacaacaaatgcgtcgcttcatcggcattatcttaaatgctaagtaccgagttgagaaggatcatcaggatattggggtcctaatcccacttgatgatgaggagctgaaacctttaatgaccaaagccttgagacgctactttaacgctcttagaagcaatgagaagcacattaataacgttgaaaactacttgtacggcaccatgcacaacctatttggggtttggtggaataaacaagcggctagagaatatgcggccaaccaccccgaagagcaaaacgttgacaatgagcgcttttagaattaaacggtatataagctcatctaagccgttttaagtgttcggcacataattatattaaaaccgatttaaaaccgtttagaagctaaaataggcgccttaaatagctgaataggcgataactaatctagaaagatgggaaaggagttttttaaatgaccaaaccaagcaaagaagtcgaaaaaatagagcaattgttggctgacccctggacagtcaatatttaaggcatttgggaacaagcggaacataatccagaccctgataagcgcaagttgtttgacgcgttacacacttacctcttagataaacggcaagaaaaaaattatcaacgaaaagcatttcgtgatttaacatggacgagtcaaagaatcagtggttggaatgaaaaggaggcacaaaatatgactaagacacaagcatatatggacaagtatcaatttacagttgcagaaaacaaacggtttgctcgaacaaattttaccaagctagtacacactagtgcccgctttgaaggcgtaaataccactttgccgcaaacacaaaccattatggacggcatgagtgtggcaggcgttcctgttgaagatattttgacaattgttaacttaaagcgtgggtggcaatatatcactgatcaaaattcctccttaacgttaaccatggaaaaacaaattaacaagattgtggccgcggaagacgccttagtaccaggagaattacggcaaggaaaaggaggagttgatttaggcagtgaagacttttttgaaccacccttaattaacgaaaaacaagaacaatcctttttacaaaaaattttggctgatccgcaaacaacgaccactgataaagcattgactgttatgtatcataatatgcgccaacaaatcttttgggacgggaacaaaaggacggcgactttaagtgctaataaaattatgattgacggtggtgcaggcttaatcaatgtgccgttagataagtgggatcaatggaacgaactaattgccaattattatcgaactaatgacatggctaaaattaaacggtggacatatgacaatggcattcaaggattacaaattagagcaaacttagagcttaaatcagttgaagacgaaattggtaaaagaatccaagaacaattaaaagattttgcggatcaaaacccagaaattaagccaaaaaatgatccagaaaataaaaacgatcggcctagttattaggttgatcgtttttgagtttattcggtttatgggcattaatgtaatcggcaaatatttttaaaagctcttcggtttgttcaaccgaaaggttatcagcttgaaagtatttttccagcaaagctcctttttgaattaatcggcgagaacgagctttgcagtcttgccgactttcataatatttagattgccgtaatttaaaatcttcccgctcaattttttgttttaaacgcgcttgttgttcaactagtttttcatattgattaggcatagtcattaccacctaactattattggttattttgatcttgatttaaaaaggcggcaatttttttagcaatcattttaatttgtggagtggtcagtgttgcataattcaaattagatgatttaatgatttccttaccaaggctttgttcaattttgcttttttcagctttaatcttttgattaagctgttttaatttagcttcttgtttttctaagttactttgagtcacaattatccctccaatcatcttaaaataatcaccgacactatatcataagggaaacgctaagtcaaagtataagagttgaaatagcgaagcggaaggcatacactaaaagtaaattcaggagaatcagcagaccgagtgaaacgaggtcaatgcgcacttacacgtcatcaaagatgacgttgtgctaaacccattaaaacaaatactaaaaataagacttatggtttgcttgtaaatatttttatataattcgtagactaagattttgctactttaggaggtcgatgaacaatgaaaaacagaaaattagggttagttctattggcaagtgcaattttaactgccacatatataccaacaagcagggcttctgcagatactacccagttaaaacaaactaatgtcataaaggatgctggtcaaacaactgaaacagcaaaattatcagattcagaaaataatcaattgactgagaatcaaattaatcaaattgatccatatgtaaaagttgttaataatcaatacgtattacagctccctgaaaataataatgtctctcaaagcgtggttacagaaatagaagatgagctttcacaagtcaatgctgacattaaaagcaacggctatactatcaagactaatgataagacatatggagcttcaacaagtgcagtattcggtgtagtattggccaagtcttcatcaaatccaactattaaacatttttggtggggtattagggtgtatatgcgcaataagacagcagtaaataaagagatagcagaattcaaaaatggtcaagctattgctgaatttggatcacttgtatctccaccagtcggagttaccctttctgtctattttagcaatatagcagatcacctgactaatatgagagatgctcacccgcatagtaaactttatatggacattaatcgttttggcgtttataaaatcaaaacgtattaatttagagagcctgtctaaaatatgttccatagtgctaatacaaataagcaacgtctaggaggaatataaattgtcattaactgaattgggaagttttgtactgcttatctcattggtctactggtggtttttaatgtggcattcatttaaactaaccaggaaaacgttagtaattttaaataccgttggcactgccttaatgaccattttgacgtggcccatcacctatggaatgttactgattccgattttaattatttacgctgtatcgacttttatcatctttaaattaccactggcagccaaatagtatgagaaaaagcttttggcttcgcacaaccctagttgtaattcttttaatcatactgtgggcaagtaatcactacgattttccatatcatgatttagttggttatattctggttgttggcgtattagttggaatcttaggtgatcgtgttgacagtagtaggaaaaaataagcaggtattacatttgtaatacctgcttttattagctgtttcgtttcggtattacgggcaacgtctatgtcactcatgcctggttgataaagttaaaggcgtgttttaaacggggatcatcttcattatattgctgtttacgaccatgatattttccctgctggttagccaggacaatgccctgttgatgccggttaataatccgcttacgctctttcagcctggtacttactatagttcaataataaggttcgtcatcagttgccgtaaattagaatcagcaagtcccgtcatagacggcaaatttaatacatatagggtagtccctcattttgaatggtattcataatcttagctaaatcctgattatttctgtctaactaatctaatttttattcaaactatcagctaattgttgggcagccaataacattaaatccttaatttgttctggtggctcaggctgatcttggcctaaccagacacgtagaatattggtaaaaccacctagttgaaaagccatcacataattcacctgggtaggagtgccctgaacatgccagggagccgcaaactgttgataacgggggattgctttttgctgccaaatttcattcatatgatcaaataagccttgttggatcaataattgaattagatctcgtttttgccaccaaaaatttaaaaaaatgtcaaaagtagtttttagcatcatttcccctacctgcggtttctgctggagcaattgttcaaagtactgatcgaacaactgatcacacaggtaattaataaccgcttctttatttttaaaagaatgatagaacgtttttcgtgataattcagcggtttgggcaatttcagtaatagaaatatcctgaaaattttcttccgtcattaaatttataagggcgtcacataaccattgcttagactgctcaaccatacgctgctttccgttcattttgctgtcctcccatacactatcggtaacaaattatagcaatctgtagcacttagccaataaggattgttttaatgtttaggactaattatactaaagactgcaaacaaaggtaacaaatgtttcctttgtgttcatctgttaccgaaaggagcgcttgatagatgtcaaaagctactaaaattatcagttttatcgggttaaccattgcgatgtttatgggcaccttagacagtactatcgtcaacattgctttacccaaaattatgacccatttcaatgccagtttaactgatacaagttgggttgccaccatctatacgttagccttagccgtgtttatgatcactggttcaaagattgccgatcgttatggtcgtaaaaaaattatgttattaggattagccttatttggtggcttttcggcggcttgtatgctggcaacgtcgttaccagaattgattgcttttcgattttttcaaggattaggtggtgccattatcaccccgattgtcttaccaatgggaattgaaatatttggcaaagcgcatatgtccaaaattgctagcgttgtgggcgcggtaacggctttagccgctgccggggggccaccgattggtggcgtgattattgaatatgcttcttggcgctgggtattcggcattaatgtccccttaaccattgtagcctttctaattatagctatgggggtaagggaatcatatgacgaatccttggcggggagaattgatttaccaggaacgattcttttaacactaggcttgggtggtttaacctttggcctactagaaggccgccaatatggttggcaatcgggcatcatcttaggaacactcattggtggcgtattagctattggattgttcatctttatcgaaagtaaagtcaaacacccactacttgaattagatttgttccgtgaaaaaaccttaactgcttctagtttagtttactttttaactggctttgcgttagttagccccaccctgattttaaattattttttacaagacgttctgaacgatactgcgttacatgcagccctaattattattccagtttccttaacaatcatggtagcgatgcctttgggaactaagttatttgatcaagttggcgcagttccggttactttgattggcctcttagtcatggcagctagcttactgctcttgtcgtttatcaccaccacaacgcctaaagctgttatcattacttttctggtgattaacggtgttggttttgggttctcttcggtttcgttagtggcctcggttaagcatttgccaaaaaataaaagtgggattggttcgggaattgttaacgcagcgcgtcaaattggcacctgtttaggaattgcaattctagtaacggtccttgataataatgtcaatacagctaagcagcatattcatcaagatgccattcaaattgttgatcgacagcaattatcacccaaagtgaagaaagtggctcatcaacaattgaatagcctattttccgctactggatcagccaaattaacaactaaaaacaaacagacgaacctaagacgtgcccttaaacaagcggccaaatctcaagttgatttaccacagccccaaaagggaaccgatctgcaccaggtctaccaagcccagaagaagttagcactagctactgacaacttaaaagcgggtaaccagcaactagcacttaccttaaccaagttagaaaatcaaaataccgctatatctaaactgtcagtagcttctcaaaaaattaatttgggtaatcagcaaataagccagggtcagaaaaaattgttagtaggtctcaaacaattggcacaaaaagaagctttaatgacagctttgagaaaaattaagcatactaagaatcgacaaatcagccaggccttcagtcatacctacttagtaggcgcgatgattgttttgatcctgtcgccgattgctttgttgacagatcgtaagccattaaaaagttgaactgggagctagccactaactttaatacggattaatagctaaatctaaaaggggcctcgtattcgaagccccttttggtatggtgtaaacagttttaaaatatgttgtttttaactaatttaaatcgtcgctgctgcgtgcgtttactaatccccgtctttcgttcaatcatcttataagtcatcccctgttgtcgtaactcataagcaaatttgatctgttcatcagaatacgttttcggtcgtaaacaaagcaaccggtgccccaattagctatcgtgcaattgcagctgaaaccggtgtgtcggtgcagacagtaattaatattaaaaatcggttggtatagctgttaaataagcgtcatctgagcacacgttcgttatttgaacgcacgattgattgtctgaggggttgtttgatctgcttaaggatttcatatcacgagtaggacttcagtttagagatactgatgcgattaatatttaggttacttattttgcgttcaattaacctaaaaagtgagttaacaaagcttttcgttaatagcttacggctactaatttcgttactcacattaataaatggcttataagcatacattatgatattttgccactttcagctatagattaaaaaaaagcaggccacaattattaagttataacacttctctctactatttattctttcttgtgacgtttcactaggtttagtcctaagtttgaacaattatactggacacctatctttcttaatataactcgaaacaaaaacggccaatagggtatgccctaatggcctttaaacattttttattaaaaattattttttatataactagccacattttctttgtctggaaataaagtagcctggtttatttccaatgattgatttaattcatttaaaatttgttgctttttttcaccaggaattactaatctaattggctcattgtgtccattgtacagagatactttgttatcaatatcatcatgaatattttccaagctacatgatgtaccatcataaggttcaaaaaggaaaaaaccactttgagctcgtaagcgttcattattaattgaaggttcgacgaaaaatgggtgaagtaaagttctaaagttgattagatcagcaaaataaccagtatctcttttaatatcatgatacaggcattgcatttcataagactgatttatttctttatagaaatcatttagtgagtcatatactttttggttttcctcagaaagttgttcataatagccctctgggaactgcttgaccagatccatgtaccaactttggtataaatgattttcatcttctttcaacaaatcatcaatatttttgttgaaagaagatatttttctacaaatacttttctttttttcttcgtccatcaatgctaatgttgataagacttccacggtgtcactgcgactactatagtatgtgaaatcatcaatattttgtgtcttgttagaaaaaaacatggtaactatcccgtctgtttcatgtccttcagaatcaagatgagattgacaggcaaaataaagagcgacaagagcattggtcgttacatctaataacctagttggcaagccaaaatgttgcatataagacaggcgagaaaaattgttttctaaattgttaaaatcgtttgcgtacctacgcatgtactcattagtaaatgaatattcatgggtatatccggagagctctttttgtctaaagatgctagcaacgttattactacttttgaagtcatttgactgtcctctatagaaaaatcgtggtagcaaacctcttccatcaactgttacattagcttttatagactttagggattctgcttttttgcttaaaaaactatttacagattgaatattcaaaatagaacctcctatagatataagcaagcactctgataaaatgaatcaattaccgtatttttatgctcaatgttcttactaagatgacttacgttaatacactaatccaggttagaatgaagtacactactgatttaaaaatatgtttctaaaagaattatatctctgtataatgaatcaagtagagaagttaaggcggtggctatttccgatcggaggcggtgcttatggtgttaaacctttaaagcccataaatcctaacgaaaggagtagcctaagtgtccgtttcggacgctttacaattaatgctagctttcggtacatttatcgtggccttgattgcattaattgttgagctgatcaaaagtcagcaaaaaaaataatccgtcttagcttttggcagggctaacggattatttaatctattattaaactttgccaccgtcttaaacggctctacatgggaagccctgttctagcggggcttcctttttctgtttacattatagcatggctataacggacttgcgactattttaagtgtagtttctcaaaggctagagaaactattgttcgttcttgaaaatatgtaggagcaacggcctaagaaccatatatagtggtataatatgtaataaaaactatatgtagtgtttggaaggtgcaattcttggttcaagagaaacacaacaaactattgagcgcaataatttcgattggtcttttaagctttttaggaatagtggttgaaacagcgttaaacataaccttcccacaattaacaacgtatttttctatacctatcagtcaagttcaatggttgactactggatatatgctagtctcaactagtttgattccattgggttcattctttttaagacggtttcgtgtggtaactttatttagagtttcgtgcttaagctttttagtcggtacgttgattgcaagcttttccaacagctttaatttagttttgctaggccgcttatgtcaaggcattgctgatggaatcgcgttaccgttgatgtttgctgtcatactagatcaagtgccaaagaaaaaagttggcacttttatggggctaggtagcttagttattgcctttgcaccagcagtgggtcccatatatggtggcataattcaggacacattcaattggcattttctatttataattttaataccaattattatggttacctggctgcttggtgagcttagcattgaacaaagttcaccggttcattacgttccctttgatgtccgtgggggcattttcttggccatttttttgacaacgacgttgatgtttattgttaacttgactgctaacagtagctcttttaaattgtatttatttttactaggaacagctttttttagtggcttacttttccttcttaatgagaagcataagagccataaattgttggaattaagtctctttaaaaacaaacgctttttgcagttgttaagtgctttttttctattgcaattcagttctttgagtatgtcatacttaatccctaatgtgctacaaatactttttgcccagtcacctggtttggtaggttttctaattgctcctgccgctgtgattgatgcagtgctatcggtggttgctggtattatttacgataaaactgcaccccgcttacccattataagtggctgtataatcattggactgacctttttgggcgccaacctatttacaccaagtattggcgggctggttttaatatatatgctttttatggtgggattgagctttagctacagtaacatcatgacctatagtttgtctcaattacctgctgggttagtaaatgatggtaattcgatttatatgacggttcaagcttattcaggagcagttggaattgcaatatcgtcctctattgtttctttattgcagaaacaacaagggagtgtaatttcagggacaaaatgggggttagcaatcaatttcttgattttgttttttgttgccgtattcacaatttctctatgcttgatagctttacgaaataaagtaattaaaggagataaagagtaatgagtttagatgatataaaatcattttctaaagaaaatatggcctttgatccaactgggcatgattttcttcatgcccaaagagtggctaagttagctcagaaaatatatacagaagattttaaaaaagatgaaactgatattggtctgtatgttgtgaaagcagctagctatttgcatgacaccatagacgaaaaagtcactgcagataaaaagaatagactgagagaagtacgaattatacttagccatgagaatattgcaactccggctagagaagacattttagatattatccaacatatgtcatattctgacaacattgaacaccattaccagctttctaacgaaggtaaatgtgttcaggacgctgatagacttgatgcactaggtgcaatcggcatagcacgtgcatttgcttacggcgggcacgctggacaggaaatatacgatcccaaaatatcagtgaaggaaatcaaaacacacgatgattatcgccatcacaaaagtacaaccatcaatcacttttatgaaaagctactgaaattagcaagttcaatgaataccagaacgggaaagcaagaagccagtcgtcgaacaaagtatatgcgtgatttcttatctgaattccaaatggaaacaagtgtaaaagatgagacataatgagtacatttattttaaatcggcattttcccaaagctaaacgacaacgttgcctggttcatgttgggcgtaatttaataaacaaggttcgggtgaaagaccgtaaggccgtgatcaatgactttaaacaagttcattgggctgccaatcgtgaagcagccgaactgaaactgaatgagttcgccaacaactggcatcgtacctatcccaagttaatcaaagatctgcttaaaatgccgaatctgctcactttcatggactttccaccagccattcgtcaatcactctactccactaacttgattgagaactttaacaagcatctcaagcgcaccacccaccacaaagaacaatttccaacggaagattcactggatcgattcctggtttctcagtttaatgcctataacgagaagtctctgaagcggatccaccgaggctttaaaggactccaggacaccttggaagcatcatttatttaagttagttacatattatatgtacgaaggcatttcatttacacaagattcttgacgctaccaagattttcgatgtatcatataattgtgttaacaaatacgtaagacttttaagtttgtttaaataattgacgtgtgacttatgttcaattcagctatcaaatggttcgggggaacttgtttaatgaagaagttagaggttttaggaaaagctagaagtggggcggtgactgataacctgtacactaaggttggaaagcgcgcattcgactttttggtttcaatcatcggtttatttatttttgctattgcgtatataatcctgtttattccatatatgctgatggacccgggaccaatgctattccagcagtctcgcctcggtaaagatgggaagatttttaaaatttacaagtttcggtcaatgcgagtgaatgcagacgaatacctacacgcaagtaaagaactgtttgctgagtatgttgcagcgggttacaagctggaacctgaacgcgacccacgaatgaccaaaattgggcgtttcatacggaagactagcattgacgaacttcctcaattcattaatgtttttaaaggtgaaatgagtcttgttggtccacggccaatcgtggttgaggagcttgaagaatacggaattaagaagggcctgtttcttaaaatgaagccaggcatcaccggcgtttggcagacctctggccgcagcaatgttacttatcctgcacgcgttgatctggaacttagctaccttaatcagcctagcttctttagcgacgttaagattctgttcttgacggcggtacaggttgtaatgcatgacggtgcatactaaactgatgttcttggagtttaacttatttatgagtgacatagaaactgacgggaaaatattttcctgtttgtaaattggtagattgcaaatttaatccgaattttttgacaaattagtcagcatcacttggtaaggtgtttgccagttaagtactttaaggaggcgttggttaatttcgagtaacgtcgttgttaaatcttgagcactaatgtgctcaaaacaagtccccttagggtaaaaataacgtaagttccgattgaatcgttcattactgccgcgttcagcgggcgtgtaagcatggcagtaataggtctgaataccgtattgtggttcaaatgacactagattgctaaactcagttccacgatcgacagtaaaggtgtgtaccggtcccttaaaagttgttagaaacatagttagggcttcattaacagtcgccgctgtccgatcttttaatcggtaagcccaaagaaaacgtgatttgcgatcaattagcgttaataaagcagccttgctatgtccacgagggccaaccactgtatctattccaaaatcaccgatgcggttacgttggttaatcacaattggtcgttgttcaattgaacgccctaatgattgattatatttagaacgtttgtcaaggttacgccgttggcgtagcccatgttcaggtagttcactcaaggagaattcaattttcccctgatatagccaattataaatagacttagtggctagtttaagctcatgcgcaatcacttctggtgaccagcttagacgtaaatggtttagaatagtttgctttaatttggcattcagtttagtttttcggccacaatgcgcccgtttatattcagcgttggcctgtgctaattcagcttgataaggttgacaacgagataattcataagaaatcgtagacggagatcgttttaaccgctcagccatttggatattggtcagtcctagctcacaaaaggtttcaattttaattcgttcagaataggttatactagacaaaggatcagctcctaaaaaatgggtttgtggtaaacaccattttaaaggaagctgatcttttttgtccgaacagcgttcggattaattttacaatctaccttatttaaaaatagttatgagttcatagtgatgattggtgttaaaaaagccacttcaaaaagtggcttttttaacaagtaacaagtaacaagtaacaagtaacaagtaacaagtaacaagtaacaagtaacaagtaacaagtaacaagttacttgttactaaggttcaaagcacttatccctgcttctagaatagtgttcaatacatctactttagtttttttctgtttatacgcaacttcatttatgagctcatacttgctctctttaactctaagaggttttgttttttcttctttagcaaatggacttgttttactttccaaccgttcttttgcatgaatctgattaagaagactcttcttttcaggcattttcatttctccattcgtgtcaatgcttcatctaaaactactttgtacatgtgcagtactcgcttgtcccaaaggtcattatttttaataccacttctaccaaatcttttgacgcgttctcgttgatagatattttcatggaacaatgctgggccaagtgattctgaagcatctttgataatttcttgatcaacgcgaccatctatcttcacaagatattgaattatgccaagtaaatcaaaatgggattcgtactcggtcaagtcttgaagatagctaataaattttaacgtactcgaatatgcttgttcctgtgtttgcaatacacctataatgtaatccgaagctaaaacggcgttattgacaaagtttgataaagttggtggtatatctattaaaacaaagtcataatcattctttatattacttagaagtttatcaagaaggtatttacgatcatcttttctatactcttctagcatatctggaaatgcggatagtgaccaatcactgactaacatatcaaagtagtcagtaaattttgtcacagactgagacaggtcaaataattttagcccattcataaattcatttttggggctgctaataatctttgggtatgtttttttcatgatttcactagcgttaccttgaggatcaaaatctactaataatacttttcttttagtttcagctagtaaataggaaaacaggcaactagttgttgtttttccaaccccacccttgaaattaccgattgttattactttagtcatgaatccacctctttcaatagcttaaatataatacaaaaaggcgaatttgtaaatatacttctgtaacaagttacttgttacaagtaacttgttacaaagatagcgatatttcttgcgtattaaggttgctttaatttgtaactatggtatatttaggttaacaaaaaagagcgttgatcaaggagttatgtccagtaactctctgatcagcaaaccaagcaccgtgttgcttgatcgcctttaacgctcgtctttatagatggctagctagaatgtgaactactaaaagtagtcaacactagttgcctgataggaatattatactaaacctattaggattatgccagtcgaaaagtcgagttaaacgcatacataggtttagttaaagcagattaagttaccccagtgggcggcttaatctgctttttgtttgcttaaggctaaaagggagaagtacttcatgtttgtcgaaacctgttaagctaatcccaattaacaattaaataaacaaaaaatccccgtgaggctaatcacgggaactcatggaactaccaaagaatgagttaattgtactcgtgccagttacgtttggcaagggatttacagataaggagggggtattattatgactaaaaatagtatgtcttttgataaagtagtaggtaaaagtttaaatgttgagcagctgcaaaaggtaagtggtggacagtttaagaatatttcattaatgtatggaaataatgtttcccgcaaaacactgacaaacttttttaaatctttaataaaaaagataaattaggtggtgtcccgcatgctggattttggtgttgttgataccttttatcagggatttacctctattctagtagttttgttatggtactattttttatctggtttatttaactggaaaagcattttgaaaatactggttttagcatttcttttgggagtattaagtgtttttgttgcagattttattcttctaatcatggtattgattaattttgctagtcaatttattcaaaaaaatttgttggattatgataaaagtgggattttgctactagttgtaattatccaagttttaattggtaatattgcaatgtttctaggaagaatgagtgttagaggattgtataatgtctctaacctgatgggtgtacagtactacacacatgagctattaatagtatatgtaatattcgttattgctattaattatgttgttttatttttctatagacggtattctcataaaatagcgagtgttagtcagaagataaaggaattaaatttaagtaaatcgttatttgagctggttctaatattttatgttgctattgaaagtattatgttaataagcttaaatgaaaatattacggcgaccattcaattaactttaataacttcatttattgtgatgttgcttatgatgttgtggcagatggttttttttattcggtcatatatgaaaaagcaagaagctagccaccaggcgaaacaaaatacacaattaaatgaatatttgaagagtgttgaacaacaatatcttgagctaagaaggttcaagcacgattacaagaatattatgttgtcattgcaagactccatatctaacgggagttcttcagaacaactaccatactttaaagaattaattgcgcagagcgctatcgacacgtcgttagataatggtaagatagctaaaattcagtacattggtaatgaaacattacggggattaattgtacagaaatttttcgatgcccaaactaaagggattgagctgagtctcgaacttgatcagagtgaattcataattaagcataatttggtagatgttgttcggattgttggtaatttattggataatgcgattgatgcggccaagtctactccatataagcaggtaacttgtgcatttaactcgctacacgaaacgaaagaaatttcagtgagaaattcaactaataagaaacttgacgtgaataagatgttcgaattaggtgcatccactaaagggagtcagcgaggctttggcctatcaaatgtgcaacaattggtagacagacaaaagaattttttcctggatgttgacagcaaaaatgaccgagttattataactttgacaattttggaggaagaatgattgtttccaatttatttatacgaggataatgctgagcaaagagataattattgtaagaccgtcaataatacaattatgattaatgagtttgcaatggagcttagggttgcaacggatgatcaaaaaataattctagcagatttgaatcaacaacaagatggccttttctttttggatatggaaattggtgaggacaaacagactggacttgaattagccagtcgaattcgggcaacgataccattggctaaaatagttttcattacaacacacgatgagctatcgtttgtaactctggaacggcggattgcaccgttggattatattttgaaagaccagtctgctgacctaattacgcaaaggattattaaggacatcaatgtagtacagaacgaattaaaaaagactaatagtcagcgcaaagatgtttttaactataagttaggaacgcgatacttttcactcgcattagatgatgtgattttgttgagtacatctaaactgcgtccgggcagcgtacaactccatgctattaataaggttgctgagttcccaggaaatttaaatgcgctcgaagaaaagtatccgcaatttttccgatgcgataagagctcgttggtaaatttaaatcatttgcgaagttttgactataaagaaaaagagttgttgctcgacggtgaaattaggtgtaaggcttcgtttagaaagtcgcgggaattgaataagttgttgagagacaactagttttttaatattatttagagcttctgtcagtgttatttgacagggctcttttgttatgaatatgaaatctgattatataatataggcgctgaagatagttggagtagggctctgtgatcttatgagtattaaaatgactaaaaagtaagcacagtactcgatcgtaaagtatattagcatagcgttaagacgtgaaatttagttagcgatatgactagctcttagcgtaacccaaaacttcagagataattgaaattgtagtgctgcaaacaataatttataggaattcagaatggatgattactcgtctattttatcttcaatatttaggatactcaataacttccaatgcttagaggataggataaacgtagcaatgccaatgaataaaatatttagaaagagcccctttagaagagcttccattggcccgttaatgggtgattgagttgggtcaataccttgagaatagaaactagaaaaatctatcaaccaatggacactaatggcagccagtaagcttccggtttttaaatagattgctgcaagtaaaatacctaacccaataacatagagaacctgacacaatactgaccatacgggctgtgataaaaggttgaccaaatgcatagccgcaaaaataagcgaagcagtcatcatcgaagcgatggtggcctgcaatgtggcaaattttttaaggtttagtgctaaaagcgttctgaatatcatgccacgaaaagcgtattcttcagttatcgctacaatcaacgaaagtaataatgagattaaaaattgatacatgtggtttcgaaagaaaataagtagaaatattattgctaggctcaaaggcagactattcttctttaatattgacatgatattaacgggtagccagtggataggttgcttaacatatcgcctattcagaatgattatcgcgattaatataatagattcagttaatatgaattgaaagggtccgtcttttattcccataatatcagtcaaaggattcattaaaaagagcactattaggtagtaaatagctgtgattattacttttattaatggcatagttaaaattccccccatataaactaaaaaggctgagcactgcaggcccagtcataaatcgagtgctttcttatagtgcttaaacttgatggcttgaactatccgtggatgaatcctcggacagcgctaatgacccaatcggcaggcccaacagcacttttataattattccgaacgccacgcgcgctataggcatggaaaacgccacctgaaatagcatttaattcacggtcacgcaaaactagaaattttttcataattgttgatctcccccaagaaaattaacgaatacttttcaaaataccacgaatgcctgcaactgaaccaatttcatcaatgtcgaacacttttaccaaagttataaccgccccgattaaaaccaccagatattttggcaagctttttttgcggcaacctggaatattgtaacttctcaaactgtagcataaataatcccccttgtatgatgttatttggaacaaatttagtttaatttatttttttaccagattgttgaaaaaattataaaagtaaaaaaacgttctcttaacgtcaaataccaatgttagctagttgatgtttaaccgttaagcctgatgaggacatttatcataaaattatgtacgttaatagatagttggcatacgataacatttgttagcccataattaaatagataccgatacttaataattggtgaactgacaaatttgtccaaaaattcggattaaatttgcaatctacccttttattttaatgtagcactgcttacatattctcccgcaatacggtatacctgcgctgttgttcctcggtcatatccttgtaatactggtcaataagaagctggataatctcgtagtcgaagctaacatgttcaattgtcttcaggactttcatatccttgtaagtctctgcggataccttaagggattttttctgattttttggcatagaggaagatttattctcttttttcgtagcattatctgttgcatggtactcttctgatggctttaccgctccggtaacccttcgttgaagaatattaggctttttacttggcatcttacttggcctccttatcatctataaataagccaatccggcttaataactcatcggtaacttgctggtacttgtctaacactcgcttatcgaagcggtccttatcggtaattccattaattgggaatcgtttaatccgggccatttgagtaacaatatttgtgaatacattttcttctccaaactcatccttagcagattgtatgattgtctgatcgacaccgttacgggcatcgtgaagcattggcaagataccaattacctctatatctagctgatactcttgctgaagtttagaaagggtattcacatactcttctgcaccggatagactatcatcgtgtgtttgcaagctgataagtgcaaagtctgagaagataacagcattacgggtaatctcaatactaaatggtggcacatccaacagaattacatcatatttcttcttcaatggattaaacaagggctccaacagatgtgtttcttcgtactcattattcgtattctgatataaatatttcgtgaaatcttggaaatcaatatatgaaggaattaggtcaaggttatccattatcttaactggtaagtctgttagatctttctcctgtacgcctaccatcagagtttttttaattgagtacacggtatcttcctgctgacttttcgttaacattagtgttttagtggcgttggcttgtgggtctaagtctgcaaccaacgtatgtattcccattttagctaaggtataagcgatgagatacgtgttagttgtttttcccacgccacccttttgattaccaatcacaatggttaatgcctcatcacgagactgtatagcctttactacgtctggaatatccataacaacgacctccaattgatttttaattagtataccacaatttaatagtgaaagggaaatttccctaaatagttatttagatatatagaattagggatatatagaaattgggataaagggaaaaagggatacttatcgactgagaacactgttataatgggaattaaaaatatccctaaatagaaaaagggatttagggataattctatttagggataattctatttagggataaatagataaagggaaaaagggaaattaaatataattgttgacagatatcctatgaaagggctataatcattggtattgacagtcttactatatgatgtgtttttaacattatttctaccgtttgctgtactaactgtgaatcatgggggacactgtcagtagttcaaaagaagtaatacctaaaaaactgcataaaaaaaacacccaccgactggcatcggtgagcgccacacaaaagtcaactcatttactgactattatatcatggccggtgcgatttttaaagccctaggggacaagctggggtctaaatccaaggggacacgtttgccagggcgacttcaataagtctggctataccacaacaaggtcatctgtacggctgggtggtgaatggtgagcgcgaccattaacggcgcgggtggtaaaacgaagcttcggcttggtgccactgattagttggcgatcgaacaaaaataaatacgtattgccaacgcctactagggcgttttttagtaggttaaaccgaaaacgtaggtttataatgagtggtggtagcaataccgcaattgtacagacaagcgacgggcgttaacgaccgacgaactaaggggaaacttttagtagtagaattgtactctggttcagttattccaaatagctgattccagggaacaattctgcgctcaaaacgtcactccctctaaactgaatggaaaaccgtagaccgtcaagtcaaattccaaagaaaaaaagaaagttggtggaattgttggaatgtaaggattacattgttccattgaatccagatgtgatcgttaagaagacaatctatcggagttctgcaagaattactgagcgacaaaggaaccaagtgaagagagttttgcgtagtcaagggtatcagggaagaattagtagtattcgatacactcgagtaaattacaagtattcctttaaagtatccgtgaagtatcggggaagtgttggcaaatttttggttaatacaaagaatgagacagttgaatttaagggaatggtctaggagtaatcccagtgaatttcacaaactcattttccccaattaaggccaatctgcaacctataccacttcttttttgggcaagttcacaaagataaaataacggaatgtggaagtgccagggcgtgatgaggttacttgggataagccgccttatgtgaagtagaaattggtatactaaaaaaggctcccggtttaacactggaggccttttttctaggttacatattttgaggatgaatgtttttatcttcgtagcttttacttgggtgctgtaacatgatgaatactgcttagtttttggtgccgtaccccgcaacagatgcgtcgcttcgttggtattatcttaaatgctaagtaccgagttgagaaggatcataaagatattggcgtcataatcccactggacgacgaagaacttaaatttttaatgactaaagccttgagacgttactttaacgccctaagaagcaatgagaagcacatcaagaacgtggaaaactacctgtacggcaccatgcaaaatctatttggtgtttggtggaataaacaagcggctagagaatacgcggccaaacaccccgaagaagaaaagctggccgacaacgacaacagtgggttgtactactagtcctaaaaggctgcaaaatcctttctaagcggttttaatacttactaacctttatacttaaattagatttaaatggcttaaacagaagaacaggggcttttaaataagtggcagagctaactagctcaaaagttcagcctttagatcaatgccaacctcaagtggtctgaggccagggttttatccattgatcagatactcaaaaggtagtataatggtagtagcaaaagaaagggttaacttctgtgttcgacatgggaacaggtgtatccttctcgccatcgtcaccacactattgagaaacttgtgctctcaaaactagctaatatcaaatatcttcatatgaaccggaacaccaattacttggttaagtcctcgaccgattagtattagtccgcttcatgcgtcaccgcactgccacttctaacctatctacctgatcatctttcaggggtcttacttccataaaggaatgggaaatctcatctcgaggtgtgtttcacacttagatgctttcagcgtttatcacatccatacgtagctacccagcgatgcgcctggcggcacaactggtacaccagaggtatgtccatcccggtcctctcgtactaaggacaggtcctctcaaatttcctacgcccgcgacggatagggaccgaactgtctcacgacgttctgaacccagctcgcgtaccgctttaatgggcgaacagcccaacccttgggaccgactacagccccaggatgcgatgagccgacatcgaggtgccaaacctccccgtcgatgtggactcttgggggagataagcctgttatccccagggtagcttttatccgttgagcgatggcccttccatacggtaccaccggatcactaagcccgactttcgtccctgctcgacctgtctgtctcgcagtcaagctcccttgtgcctttacactctgcgaatgatttccaaccattctgagggaacctttgggcgcctccgttactttttaggaggcgaccgccccagtcaaactgcccacctgacactgtctcccaccacgattagtggtgcgggttagagtggtcatacagcgagggtagtatcccaccaacgcctccaccgaaactagcgttccggtttctatggctcctacctatcctgtacaagctgtacaaacactcaatatcaagctacagtaaagctccatggggtctttccgtcctgtcgcgggtagtccgcatcttcacggacaatataatttcaccgagtctctcgttgagacagtgcccagatcgttacgcctttcgtgcgggtcggaacttacccgacaaggaatttcgctaccttaggaccgttatagttacggccgccgtttactggggcttcaattctgagcttcgccgaagctaacccatccttttaaccttccagcaccgggcaggcgtcagcccctatacgtcatcttacgattttgcagagacctgtgtttttgataaacagtcgcctgggcctattcactgcggctgatcttgcgatcagcaccccttctcccgaagttacggggtcattttgccgagttccttaacgagagttcactcgctcaccttaggattctctcctcgactacctgtgtcggtttgcggtacgggtagttaagtactcactagaagcttttctcggcagtgtgacatcagacgcttcgctactaaatttcgctccccatcacagcttgtccttaaagtgaaaagcatttgactcttcacaagacttactgcttggacattctaatccaacagaatgcacatcttagcctcctgcgtccctccattgctcaaacgcacttaactagtacaggaatctcaacctgttatccatcgtctacgcctctcggcctcgacttaggtcccgactaaccctgggaggacgagccttccccaggaaaccttagtcattcggtggataggattctcacctatctttcgctactcataccggcattctcacttctaagcgctccacaagtcctcacgatcttgcttcaccgcccttagaacgctctcctatcacgcgacctaatggtcgcatccatggtttcggtagtatgcttagccccggtacattttcggcgcaggatcactcgactagtgagctattacgcactctttaaatggtggctgcttctgagccaacatcctagttgtctatgcaactccacatccttttccacttagcatacatttagggaccttaactgatggtctgggctgttcccctttcgacggtggatcttatcactcatcgtctgactcccggatatgaatcaatggcattcggagtttatctgaattcagtaacccaagacgggcccctagtccaaatagtgctctacctccatgatcctaattccgaggctagccctaaagctatttcggagagaaccagctatctccaagttcgtttggaatttcaccgctatccacacctcatcccagcaattttcaacttacacgggttcggtcctccagtgcgttttaccgcaccttcaacctggacatggataggtcacctggtttcgggtctataacctcgtactcaaaacgcccatttcagactcgctttcgctacggctccgactttttagtcttaaccttgcacgggatcataactcgccggttcattctacaaaaggcacgccatcacgcattaacgcgctctgacttattgtaggcacatggtttcaggaactatttcactcccctcccggggtgcttttcacctttccctcacggtactggttcactatcggtcactaggtagtatttagccttgggagatggtcctcccggattccgacggaatttcacgtgttccgccgtactcaggatcctgaactgagagaatttgatttaatctactgggctatcaccatctatggcggattttcccaaatccttcgactatcaagttctttggtaactcaaatgttcagtcctacaaccccaaagtgcaagcactttggtttgggctgttccccgttcgctcgccgctacttagggaatcgaaatttctttatattcctgctgctaatgagatgtttcagttcacagcgtttacctccaactagactatgaattcatctagtggtaacagttgattaaaactgctgggttgccccattcggaaatctccggatcatagcttacgtacagctccccgaagcatatcggtgttagtcccgtccttcatcggctcctagtgccaaggcattcaccatgcgcccttgttaacttaacctcatttacctaaccgaacgacgcgaacagattcttagccagattgcgcctaagatggtcaagcagatgggaagtgtcataaatcaactaaaagcagatcatttgattgtggattggccgaatgatttgatactgcaaagtttgttatcgcagctattcggttacctagcgcagttaatgctggaattgccgggaactgaaattgagcgcgaacaagcgtatttgattacggtgatgaccaaaatattgaccccgggtgaacatgatcaaattactggtcagtgagctaactgttacttgatataaactaaagccacttctgtacttagcggtcatttgaacgctaagtacagaagtggctttggtcgttgctacgcgtgttcgtttgttaatctgctagtatcgtcattttattcaacaaactagtttgtaactggctgagtgtggtcgtcatgtagaccgggtaaagatctgggttgacgagccgctgggttgttcgtgggagctcggcaagtttagcctgggtcgttgcctgaatggttgtaagaacctgtctaatatcttttgagcatcacaatcaaataagctaaaacaaccatttggcgactagtactaagatgtcgttcgcaatttttccaaaggcgccgacatttatctagccaactaaaagtacgttccactaaccagcgttgcggaagcacttcaaatttatgtaattcattacgcttagccacctgtacggtggcttttaaattggaatgaacagcggcggaaaagttgttcccagtgtacccaccatcaactagtactgttttgacgtgattaagatgttcacgatataacgtcaacatagcaatggctccttgacgatcagacacattagccgtagtaatgtgaatagcttgtggtaaaccattgatatcaactgctaaatggcgcttaatatcggaaacttttttacctgcatcataacctttatgctcagcagtatctgcattttttacgctttgggcatcgattataataaatgtcgttttggctgagcgtgattgtaaattacgctgttgagcgataatttttttaaacagttatcaagtagcgatgcctctgtgacaaaaggcgatgcagaccaaagcttgtagtaattatagacggaatgccattcaggaaaatcacttggaacttgtcgccattgacaacctgtttttaggacatagataatcgcacagaagacctcgtagaggtcatattttcggggcctagtttgttttcgaaaactttctagctctggtcgaatctgttcaaattgtttgcgggtaatattgcttggatagtttttcatggctaaaactcactttttaataaaactatatcagattttttagatattagacaggttctaagcaagtcgccttacgggacatactctgaaaggtatgatgagttttaagcgttttttgccactgcttatgttggtactgaaatccttgatctgtgtgtaccgttgttcgataaggaagctcaggtagtccatctaatgcttcttttagtggcttcaacgcaaactcaagagttggatgtgcactaatgttaaatgccaaaatttcacccgaaaataaatccatgatgggctctaaatagattcgttcactttgactcatctgaccgtatcgaaattcactaacgtcggcgacaagtttttgatatggtcgatctgtcttgaatcgccggtgtaacttgtttttggcgattctaccaacaactcctttgtatgagttatatttacgagtttgcttattaaaggcctgacatgtccagccttgttccttcataattcggaggacgcgtttgtgattaactttaaatccctgttcatgcataactaacgttatgcgacggtaaccgtatttttgagtatacttggcatctgtttggcgaatttcatcaatggcttggataacctggtcatcatcatattttcgtccctggctgtgcttagtgtaatagtacgtgctacgtggtatcttaacggctttgaggataaaactaatcgacgttttgaagactcgcctcagatcatcaattaaggtcacggtttcgcgtgagctgatttttcgtgatctaaggcatcgagtttttttaggaattcattctcgattcttaacatcttattttcttgcttgagttgctttaactcatctttatcgtggcgtgcttgaatttgtgctgttgtgggtttggttacttttttatacttatgcttagccatagtctttgaatctcctctcactctatttaggccactgagtccctttaaatcaaactttctttgccattgccagatagtacttggtgaagagagattgaagtgtagtgctgtttctgaaagcgaagcttggtgctgttgtttccagtttaatacttctatcttgaactcactagagtattccaagttcataggtctcggttttaatcctgcaatgccaaaatgattaaagcgatgaacccataggagaatcgtttcattgttggcaatatggtattttctggccaattgaatggaactaatacccgttaaatattgtgtcacaatagaaattcgtaactctaaattaaatttagtcataataaaacccccgagattgttgtccaatctcgggggttcacttcaacctcgtgatgagatgagtggctttttggttgtgccaattttgtaggaccccctcagctattgatcaagtcgtaatagtaaccatgttcattcaacaatgccgcatgggtcccctcttcagcgacccgaccatcatgcagaacgatgatatgattcgtccgctttgcaatcgacaaccggtgggcaataaaaataatcgtcttgtcagtcattgccactaaattatcgattaattgtttttcagtaattgcatccagtccactcgtcgactcatcaaatatcaagacttgagcgggtgataataacgctctcgcaatcgttaatcgttgtcgctgaccacctgatagtgtattaccattctcatctagcttagtttggtattgcatggccattttattaatatccgtatcaattaacgccagttggcaagccttcgcaatatctttctcagtaataccgctgcgattacctaatcttaaattttcttcaatggtcgctgaaaagatgtatggttcctgcgggatgtagttaatataggtccgcaatgtatgcttgtcgatgttcttaacgttgaagccgttcaatatgacatcaccactatttggttgataaaaatcaataagcaatttaactaacgtggacttgccagagccactcatccccacaattgcaaccttatcatgttgtcgaatcgtcaaattaacatcatctaagacattttcaccgtaaccataacgatagctgaccccttgtaacttaatatcaccatttaattgactttcattatgaattggccgtgacgcctcaaattcactagcgaccaaatacacttcatttaaccggttgttagcgaccttagcgctttgaagcttagtctgcaaattaataatattctgtagtggattaacaaaataggctaataaagcattatatgtcatgagctccccaactgataactgattatgaatgacgagattggcgcccacccatagaacaacaacttctaagactaactgtataaacagttttaatgcctgttgcaaagtatccgctttaagataggctaaactcttacgtagataatcaacaaattctgaatcaattttctgataacgttccgtctcaccattcagcgccttaacagtttcaatcccatgaagatcctcaataatggctgaactcaaaatagcattgctttccatttccttttgattcaatcgttcaaaggatttattaaaggctaagatgacaaccgcgtagattggcaacgagagtaacgtaatccaaaaaagtgtcatattctggattaccaagattgcccccataataataacgatgctgacatctaaaaacagcgaaacaattgtgctagctaacgcatcaataatcttactggcatccgtaaaccttgaaacaatttcccccgtccgccgagtggcaaaaaaactcattggcaattcaaagacgtgccgaatatagcctaaaataatttcaatcgaaagtcgttgacctaaaaccgccaataaaaaattctgggcataagtaaagatagcctgaaaggtataaaaaacgattagaccaatggccaccactgccaatgtactgtgcatattattgggaatataagtatcaatcaccgcttgtaagaaataagacccacagatactaataatcgtgattaaaactgcagcaagcacaatattaataaccagtcggcgctgctttaataagcttggaataaatccccatagtgagcccttatcttgcttaactggcttatattccgacttcggtgcaaagaaaagggcaactccggaccattcgctttcaaaccgttcctttgacatactgataaccgcaactgttgggtccggatcagcaatcacgacatgcgttttcgaggtttttacaacaacataaaaatgctgtagatccccatttttggtaacatgcacaatgaatggcaatggtaaatcttggacatcgaaaagactcatatctgcttgaattgctttggtttcaaaacctaacttttcggccgtttttactaatcctaatgccgtagtcccttctaaactcgttttagcaatatttcttagataggccaatgatgttgtcgaaccataatttttcaaaatcattgctaaagctgcgaccccacagtccatctcgtcaacttgcgcaacatagtttctccaatgcatacttgtactcccctgtcaaaagctaccatttcaaaaatgacctttaactctttcacgttagctttagcaaatgcaactcggtccgtaaaaattgctgtgacgaatgcctgtagactgggataacgctgccgtaatttatcctctgaaaaatcactcgctaagattggcacaatgtgcgcggtaattggtgctaagatggcatcccgtaaggcagccttagtcttataccgccgatagaccgtcccctccgcaacgccggcccgttgtgcaatatcactagtactggtctggtcaaaacccttttcagcaaacaaatcgagacttgcctggaggatggcccgttgcttaggtgtaatcgtttcattctgacttagatcctgttgaaaataatcccgtatccgtggtcgttccatatcctcacaccttccgataacgtttcattccaacaatattcaacattgttagtacgaccataaaccctactaatattaacaaattgacaccaatatcgccaagcccagcaccctttgtcacaacagccgtcaacgcattagcaccatagtataacggcatgatgtgggcaattgcttgcaaccaactggccatgccatcgactggaaccaacccagcaaaaaagatttgtggtacaacaatcagtggaataaactgaatcatttgaaattctgagttagcaaaggtggaaataaagatacccaaggtcaaagccactaacgctaataataagttagtcagaaagaccagccaaatactaccaactaagtgaatcttgaagaccgtaattgtaaaaacaacggtcaggacagtctgaatgatggcaaagcccccataaccaattagatagcccataataatttcactccgtcgaattggggttgcaagtagccggcttagggttccagtagtgcgttcattcaaaagtgaaacgccagaaatcaagaacacaaagaagaagacaaagaaaccgagaaaggctggcaaaaagctttcaaagaacgttgaatcactactaccataaatataatgagacttagtcgtataactggttgctttagctgactgagtcgaactagacgtcgtggctgtggcttgcttgagttgcttttgtaatttctcagcagttgcctggtcaccgcgggcctgggcttgtgcaatggcagtcttcagcttggtcaccgttgcttgtgtctgggctgctgtcagcttcttcaaagcggcttgttgcgattcaagggccgcgcgctgtttcttagtaacggtcaccagcgtcttcattttcaacttgactaatcctgattgtaaactcgccttaattaaagacgtgttggttggattactatttgaataagtaatcgtcaattgaccatttttctgagtcaaatagccatctagatcatgctgcttaatcattttccgtgcctgtgaactatcataatgatgaatcgtcacgtttttggtatcgatcacgttaaccacggattggtctacatgatgaacacccaagcttgctaattgcgtcgtgttgttttgaaataagaaatacatcagcgtcataatcagcaatggtgccaaaaacatcagcgccaaggtacgcttatcacgtaacatttgcttaaaaactcgtctaacgattgccatcgttcgcatcttgcatccgccccgctttcaaaaagacctgttcgatcgtatctactgcatactgttgtttcagtgccagtagggggtgagcagtatgtcagcgatgaaaacagcacaacaagcgattgatttgatcttgcatcaagggttacgggaaactaaagcctggcatagtaacgtcttgaagttagaaaaaacgattccggggaagcaaaataagcacggtgcgattgccatgtatcgcagtaaagcccaaatggcgaaaagctgggggacgatttatacctccaaagaagccgtctatgataactatgcgaccagcacgcattggacgcccaatgtttttaactatctcacctatactgatgcggctaagcattatgttaaaggggctaaagagcaaaatttaagtcagatcaatacgttagtggttgacgttgactaccgtgatgctgaggaacggcaagcgaagtttgccgaggtttgggacacggcgatgttggacgtccagtttatgccaacgttaattttggcgacccagaagggctatcatatctactatgtctttgatgagccagtgttcgtccgtcgtcatgctaatggaaaattgccggcggtacgtgcggctaaagcgattgctaagtccctcaaggatttttatgcgcaaaaattaccagcggtcgatgtgacttgcaacagctttggtattttcagagttccgcggccggacaatattgaatactttgagcctaaaatgacggttgacttccaagatttaatgacttggagcattaattttgcgaatgaccagcaccaaattaagccccaaaatactcaacggtctttttatcctcggcgggctagtcgccagattgaccaaccgtggtttcaagccttaattaaccaaacggacattgatcaaaacgtgggctatggtcggcataatacaatcttcacgctggccttggcttgctattcttcaaacgtgtcacaagcccagtgttttgacattttggacgaatttaacagcaatcttaatcacccgctggcgacacagcacgttcaaaaagtaattaatgatgcttattcaggtcagttccatgcggccagccgtgaatatgtgaatgcgttgctagaaacttgggttcccgatgctgacaggcgggtttatttgcagcgttcgcaaacgacctggtacaagtatgcgaagccgcgtacagaacgcgttaatagtcatgtcaatgaatggcaagcggatcttatggcttattttaaccaaagaacttcccaggacaataactggtttaccagaacgtctttacggcacatttctaaagaattaaatatttgcttaggtagtctaaccaaggccctgaaagaactaattgaccagggcttagtttatcgtgaaaaaggtcatggtcggcaagcaaccatgtttgcgacccggagcagcctattgcaacatgcgatggcactcaaaaaagcccaacggttaaactattggctaatggtagcgcgcttcttggacccaactgaacaattactggcgttacaacgattcagcttaaccagtgccccagaaacgactaaagttgagcaactgagattggtggatacggggtaaaactttgtgttctaaaatgccattacgtatttatagttctggacaagtgggctttgattgggggtgtccaggttattgggattaaggttggtgcttgactagggtgttattcagttactagttgtcccgtagccttcaaaccggttactgctccgagtcaagtagacagttcaaataattaaaatagctatgcagtttttagaatggcatgattccgaaattctttcggggtcatgccatttagtgtttcttggcgacgcttgtagttataccagttaatacatttttcgataagttgaaccatttcttctcgatttaatgcatggtgaaaattaaagaactcggtcttcatatgactccagaagctttccataggactgttatctccaggggttcctggacgcgacatactatgcttaaccccattgctagctagatgtttgttaaatactccagatgtatagcttgatccctgatctgagtgtaaaaccgttggttttgcaccattgcttattgctaatgccttatcaaatgttcgagtcaccaaatcggctgtctcagtttcttcaatgtcccaagcaatgatactgtggtcgttcaggtctttaattgcactaagtctcaaacgttcactgaatttccaaccaaaacatagctctgtacaatcagttacccagacctgatttggcttgtctggcttaaaattatggccttcatctgaaaggaggaggttattgctgatgtgctctttccgttgagcttttcgatcatgctgtgccacgcgaattgaagccacgataccattttcacgcatgatccggcgcatttttccagcactagttcgatatgttgtatcgcaatgaagattcatcattaatcttcgtactccaagggtatattcgttctcctcttcaataattttgacgtactttaatatctctttatcttccagagcacgtttgcttggggttcggtgtatccatttgtaatatgcagcacgtgagactttcataaaacgacacataaaactaatcccataaacttggtttgtatcagggttcaccgtagttgctaaagtttggattgtttcgtagatgtgtgatgagtggcatccaacctttccaattcttggagtttttttagaactgcattctctgtcgataaatgttcaattcgggcctttagacgcttgacctccaggtcacgcttctcgttatctgtaagctggtcatgcacagtctttcccttaccacgacgatcgacaagggcttctggtccaccttgtttaaacttccgagtccacgagtaaacctgaccatatgacacgttgtacttattcatggcgcgtgagtaatccatatcgtttgctataatccattgaacaatttctacacgttccagctgggttgttttccgaccatctttcacttgtttcacactcctagtggtgagttgtttaccactagtatactgatgaacccattgatagatagtactaacgttaggaatattatatttatcgcataatcgaggataagaactgtgtccttctaggtactccagaactatttttaatttcaattcacttggatactttcccatgagtcgatgccgcaggccatcgatcccctgtaatccataacgctttacccatcggcttacttgactatgttcaactccatattttctttgaacggcattaggagccattccctgagtaactagaccaatgtaaaacaacttctctttaatcgtatagcgagaaccttttctgcccatagaaaaggatcggctttgcattcacccaaaaagagttgtttagtgccatcatgctttaaaacccgttgtaagtgatgattttctaactgatctaaactaagctgtcccgataaataagctagtccttgttgatgttcttggggactgaacacctgtggtggatttgcttgccactgttcaattgtttcagcctgacatggctttaaaacaggatcatagtacatcacggctgtataggcttgttcctgtttaatcattggtaattcattaaaattgccgttaggaaaggctcttttcaatacttcatggtattgcgtttgaatgacttgcttaactgccatgattgtccgtaggtctttgactgcgcgagtaatcttttgctgctcggttggtgaatacttttctagtagaccttgatcaacgtgttctagactttctaagctatcatcatgaatcatcagtgtatatttaagctcgattttgacttccttttcttgttgcattaataacttccagccaacgtatggccgtttggtaaaggtcaataattgtcggaccaataaatcatcacgaatattcattaaacgttcgtttaattcactgcctttaaaaatcgtttgttcactattagtttctttaatcaattcccgtcgttcagccgcggttgtctgttcaaaatcaagctctggataaagttttttagtcgtgcgatcaactactttatttaagagttcatctgctttttttagtgaactttcttgttggttaatcgtcaataattgcttagtgacatcttcaccaacagcgtgcttaattaaggtactgtttttccaattaaatagcatgcgccgcttatcatctaaactttccaaactaatataagttttcagttcgtggcttaactctttgaccacttttttctcgttaaacgagaagtgtttacttaggctatccaagtggccttgattaactactttctcctgcatatttttatagccagcttgggacttacgatagttcttaacttgttgattaaatgcctttctttcatgccgtttgctattgattccctcgtgttgcattggtgtgtcagctattccctgttccacaaatgatttttcactgatccgatcaggaatgcttttttgctctaaagcctgattgacacttgccgcccaattgtgccgccattcagttattttttcttttttatcccaatcaaccaaccaaatttttcggtttctcacattccctgcaggggtcttagttttattaccatgactatctaaaatgtatttggtttttgttttctgtccccaagtaccatcggggttaaatgggcgattggttaacatcacgtgtgcgtgtggattatctgggtgatcacgatgaatcgctacatcggctaccatgccttgatcaacaaagttttcttgcacgtatttagttaataatgttttttgttcatcttcacttaactcaattggtaaagccacgttaaactcttttgcataccttgagtttgatttacgatctttcttttcaacttcattccataattgttctcgattactggcccatgctggtgcattttttggcgtcgtccgagtttgaaagatggcttcggctatcacttttggatggtcccgcggcgtattagctagatggtggggtaacggctcaccatggcaatgatacgtagccgacctgagagggtaatcggccacattgggactgagacacggcccaaactcctacgggaggcagcagtagggaatcttccacaatggacgaaagtctgatggagcaacgccgcgtgagtgaagaagggtttcggctcgtaaaactctgttgttaaagaagaacatatctgagagtaactgttcaggtattgacggtatttaaccagaaagccacggctaactacgtgccagcagccgcggtaatacgtaggtggcaagcgttgtccggatttattgggcgtaaagcgagcgcaggcggttttttaagtctgatgtgaaagccttcggctcaaccgaagaagtgcatcggaaactgggaaacttgagtgcagaagaggacagtggaactccatgtgtagcggtgaaatgcgtagatatatggaagaacaccagtggcgaaggcggctgtctggtctgtaactgacgctgaggctcgaaagtatgggtagcaaacaggattagataccctggtagtccataccgtaaacgatgaatgctaagtgttggagggtttccgcccttcagtgctgcagctaacgcattaagcattccgcctggggagtacggccgcaaggctgaaactcaaaggaattgacgggggcccgcacaagcggtggagcatgtggtttaattcgaagctacgcgaagaaccttaccaggtcttgacatactatgcaaatctaagagattagacgttcccttcggggacatggatacaggtggtgcatggttgtcgtcagctcgtgtcgtgagatgttgggttaagtcccgcaacgagcgcaacccttattatcagttgccagcattaagttgggcactctggtgagactgccggtgacaaaccggaggaaggtggggatgacgtcaaatcatcatgccccttatgacctgggctacacacgtgctacaatggatggtacaacgagttgcgaactcgcgagagtaagctaatctcttaaagccattctcagttcggattgtaggctgcaactcgcctacatgaagtcggaatcgctagtaatcgcggatcagcatgccgcggtgaatacgttcccgggccttgtacacaccgcccgtcacaccatgagagtttgtaacacccaaagtcggtggggtaaccttttaggaaccagccgcctaaggtgggacagatgattagggtgaagtcgtaacaaggtagccgtaggagaacctgcggctggatcacctcctttctaaggaatattacaatatcttcgtcaaaatggcatgattgatgatgtttcatttattgatggaactaagatcctagccgacgccaacaagtatagctttgtttggaagaagaatacgatacgatttgacaagatgaatcgcgagaaactcgttgacctgttaggcgagcttcatgaagctaaaattgtcggtgaaattccggcaggatcagagctgactcccgaactattggatatcatgattagcaaggttgaggatcacttagtggtccttaatgaaaccgtggaagcaactaagcaggtttccccgaacccagccaaacagcaacgccggactgttaaatcacaaaaacgtaagttggacaaacgacgtgataaaatgcgtgaacaccaagcacagcaagcaatctatggtcagcgtaacagttactctaagacggactatgatgctaccttcatgcgggtcaaggaagatccgatgcaaaacggtcaattaaaacctgcctacaacgttcaaatcgccacgagtaatcagttcattacgggatatcggcttttccaaaatccaaccgacacacgaaccttacaaccgtttattgaacatttaaaggccaacaatgtgttaggtcacaccatcgttgccgatgccggatacggttccgaaagtaattatcggtacttggaagatgaattcggtcagcataccgttttgattccctacggcacaatgcttaaagagaatagtcgaaaatggcaaagtgatgaccgtaaggttatgaactgggactatcatgaaaaagatgattattttatcaatccacaaaacgtccggtttaattttaatgcttatcgtcaacggactgataagtatggttttacccgtgactttaaagaatacattgccgaaaagtatgatgaaaatcatcaactaattgccgcggcactaacaccaaaaggatattttaaaaggatttacgtgaacgaaaattgggaatatttcaaatcgaaacaacgagaattactttcagctccagaaactggtcagatttacgctcaacgtaagatcgatgttgagccagtttttggcaagatgaaggcttctttacatttcaatcgattctcggtgcgaggtttcgacaaggtcaccaaggaagccggaatcgtaatactggcgttaaaggcagattgcaagaaataacttgaacgaatttaatgacgtaaattaagcaagaagatctcgattggtgtatgccaattaagacatttaagtggccgtgaattcaaataccaattaatttgaaccaattggtgatcacttagttcttcaatggcttggcctttgggaataaagcgccgcaaaactcggttacggttctcattactgcctctttcatgcggtgaataggcatgggcaaaataaacctgtgtaccagttcgccgttcaattgtctgatagttagcgaactctttaccatgatctacggtaagcgtcttgagcttgtcttgaagttgactagctagttcaagtacggcttgagtcatggactgactgtcgcgaccatggagccgtttaacaattgtcaggcgactcttacgctccacaaaagtagccacagcttgacctttacgtttaccagaaagtacggtatcagcttcaaagtggccgaattcctggcgagtttcgactttatgaggccgatcctcaatggagcggccgtgattgaacgtaccacgcttttctttagcacgatgacgacgaattccatgatcaggcaaatcggtcaactgtatatcaagccatccttgatcaatccagttatagaccgtcttgtaggcaatccccaccacatgggcaacttgttcaggggaccacttctggacttgaatctttccctcgatcaagtgtttaagttttttagtgagcgaagacttccgcccccgttgactaacctttcgttcaaagtcagtttgcgctagcccagcctggtactcactatttagccggtgaagttcgttaaagatggtggtcttactaaagcctaagtagttagcgatgtatcgcaaggaacgtccttcattatgaagcgtttcaatgacaacacggttctggaatgataaaatagtggtgctcatcaaggtccttctttctaatggattgtgtggtaacaccagtaaagaccttgatggttttttctgtccacttaaatgttcaacttaaattttacaatctgccaattttactactaccattatactaccttttgagtaccttatcaatagataaagccctagcctcaaatcacttgagcttagcgttgatctgaaggctgaacttttgagctggttagcctggttagctctggcactcatttaaaagcccctattattctgtttaagccatttaaatctaacttacgtataaataggttagcaagtattaaaactgcttagaaaggattttgtagccttttaggactagtagtacaacccactgttatcgttgtcggccgacttttcttcttcggggtgtttggccgcatattctctagccgcttgtttattccaccaaacgccaaataggttttgcatggtgccgtataagtagttctcaacattcttgatgtgcttctcattgcttctcagggcgttaaagtagcgtctcaaggctttagtcattaaaggtttcagttcctcatcatcaagtgggattatgacaccaatatctttgtgatctttctcaactcggtacttagcatttaatataatgccaatgaagcgccgcatttgttgcggagtgcggcaccaaaaactgagcagctgaatggcttcgggttctaagaagacttcccagccactttctgaatccgttaagaactcatcagcatgttttactaaatcccgattttggatttctatttcagctggtgaaaagttagctgtggaaaaatttaacttttgagtatctatcttgtatctatctttatctttttctttaggttctttatatagattaactgcactttttgcagttccgcttgtagcaagggtttgagacacttttgggctatcttcaccgcgtaaatagacatcggttgctttcacatcgagcttggacagatataagcgattcggttcattcttttttgtttttgggttaaagcccagttgtttttgcatcagcaaatgagcggattcgagttcttttttaattttgacgactttttgattatggcaattatatagaccctatatattcatagcccctttctgtttggtgttaaagtattagtcatcgatgtcatgcactatcttgtttagctccgttttgatggaactgggaatattttctaaattgaaatgattatatatttctttatccttaagcatccttttttgtgccttatttaatttacactcattgttacccactacccattcatcctttgtacgtataaaggggttttgcgcactttcctttaacgcgttttgaacatcttcataaggtaaataaaattcaattgtagatttatttaattttacaatctaccatataacgtctccatcttttcaaaacgacttaattctacgggctataaataacttaatttgccagtgtataacgtttcagattaagctaccactaagttataataaccatatcgaaaggagatcaatctaatgaaatatacgaaaaccaaagcagtattaaatcaactcgttgccgatttgagccagatgtcaatgattatccatcagacgcattggtacatgcgtggacccaactttttgaagttgcaccccttgatggatgagttcatggaagaaattgacagccaactcgatgtcatttctgaacggctgattgcgcttgatggcagtccttactcgaccttaaaagaaatggccgaaaacactaagattcaagactggcctggtgaatgggacaaaacaaccccagaacgcctcgcacacttagttgatggctatcgttacttggaagacctttaccaacacggcattgaagtatccgatgttgaaaaagacttcagtacccaagatattttcattggtctcaaaaccgcaattgaaaagaaaatctggatgattcaggcagagcttgggtcggcgccggaaattgatgaataaaataatattaaaaaatcggtaggcttaagctactacttaaagacggcctttagtaacgcaatcatgaccgccctatatgcccgtgatgaagattacgaacggcaaaaacaggcgcaaggtttaaaggagaccgagtgggaaatgactaaaaagcaacggcaacaccaaactcgaaaccggcatgaagatgggggcatgcacttgtaatcacaaaattagcgactggttaattggtatgaatggtagcccataatgtattttatattgataaaaatttggtgcgtagagcgtgctcgattagttacctatagctgccagccttgtgtatggtctatcaaagagaccaggcaatcaaaaactttaagccggaaccctattttgaactaaatgctgaaattcttgctaatcagcaaaaattcgtcgcaaaattagacccctatcagcgatttaaagacgaaacagggctaataacattcatgcaagctaaacacgttcagaaaggctcacaggctggtttaatcaagggcgttcaaaaccaggctaaaaaacgtgctagtccccaactattctcgctatccagtctgcaaagtgccatgaataaacgttatcacgccagcgccagtcaaaccttagcggccattcagagtttatacgaagccaagtaccttagttatccccgcaccgattgtgcttacatcactgatgaagaatttgattatttagtggctaatctgacgaagtatctgggtttagtctctaagccagtcgctttaaccaataccaccccaaataagcgctatgttaatggaaaaaaggttgaagaacactacgccattatcatgactaaagtcgtcccgactaaagatcaattagctaccttacctaaaatacagcatcaaatctatgacttagttttaaaaacgacgttagcgatgtttgctgatccgtatgagtacgccaaaataattggcttcggtacgttccgcgtgactttgaatctaatggcttgcttgactttaacggaagaaatatccgccgtcgaaatatatagcttaacgttcactcgccgttgttgcttgattatcggtaaaattttagcgatttcagctcctgaactaacgtactttgcaccacggtaattgtctgcaacgtgtaggacgccggctttggttgccttgatcgtgtaagattttgattgtgtcgttaagctatcaatatctgctttcacggtccgtaaatcttgctcggctttcattcgtttctcagcgacttcgcttaactgatcattctttaacatggctaatttggtattgttagtctcaacactgtacttcgtatcatcaaagtcttgtaattcttctaactgcactttagctgaggacaacgaatcctgaagcgtatctatctgctgttgaatgtctgctaacgttgcagatttaacttcttttttatcgtttgcgttgttggcctcctttgacttagcgacatactcattaaaaacagacccatacttggcactattggcatacttgctaccattagccaccgcattgtataaggcttgataagcatccagactggtcttagtatttgataccacttgttgcgcggtcttcgttagcgtggctttcttaatactagcagcgctcgattttgctgccaacatttgattctccgttaaatagatttgacgctgttttaaataactttgcaatagttctcggtacccaaattcatcggtcgttggaaaaacatcactgtcagtattgatgccatctttaaaatgatccaaggctgtcacttggcgttgcaattgccgtttgctgacattatcttcgcgtaatttattgcgattaaaaacgttagtataaactaatagacctattccgaacgaattaaaatcgaaaccttttgtgaactagggctgtccaatatccaaatgggcgttcggctgaaccgatcaccgtcaacaatttcttatgaattatctcgatgtcaaccttatcaggctgaattagcacaaacagatgccgaatacaagcgatcacgatgtggtcggaaaactaagctgagcgatgagttaaagcaaaaaattctcaaccatttacgtctaagctggtcaccaggaatgattgctcacgaatttaaactagctactaaatctatttataattggctaaatcaggagagaattggtttctccttgaatgatctacctgaacatggcgtacgccaacggcgtaacgttgaccaacgatccaaatataatcaatctttggggcgatcaattgaacagcgtcccatgatgattaatcaacgtaagcgcatcggcgattttgaactagatacagtcgttggtcctcgtgggcatagtaaggcagttttattaactttaatcgatcgcaaatcacggttcctttgggcataccggttaaaagatcggacgacagcgactgttaatgaagccctaactaagttcctaaccacttttaatggtccggttcacagctttactgtggaccgtggcactgagtttagtgggctagtatcacttgaatcacaatatggtattaagacctattactgccatgcttatacgccagctgaacgtggtagtaatgaacgctttaatcggaatttacgttatttttatcctaaagggactcgttttgagcacattagtgctcaagatttaacgacgacgttactccaaattaaccagcgaccgcttaaaatactcgactggcaaacaccgtatcaggttatagaacgtgtttggatactttgacattcgatttgattttagttaaattagatcaaaaacaggagtttttaatccatgaaaagctttgcacaccattatagtagcgacatctctcgtgaacaatttgaactaatccagacagatctagaaggcatacgtaagcggactaagccaagaaaggttgatttatatgatatcttttgtgccctgctttataccttgaaaaatgggtgcgtttggcgcgatttacccagcgattttcctaaatgggaaaccgtctattattactggttactttggactaaaacgccatctcctgctggtatcactcctctggataaggttttaaaaaaattgtcagccaacatcggttggctcagaagcgttcagtttatacatcgttcgtcattctagatgctcaaagtgtcaagaataccgatcctgctgaaagtagcggctacgatggtggtaaaaaggtgagtgggattaagcgccatcttgctgtagatatcaatgggctgccgatggcagtccatgtgacaaccgccaatgtttctgagcgtgatggcgccaatgcgctactggcgttaaacaaatcacagtttgacctggttcaacgagtaatggccgatggtggttatactggtaacaactttgctcaatcagttcaggcaatgattaacgctgaagtcattattgctaaacagagtgaccttaggcacggtcaagtgaccccgcaacgctgggttatcgaacgcagttttagctggctaggaaaatatcggcgcctctggcgcaattgtgagcgaaagctgaacaccagtaagatgatgattagcttagccttcctgcgaatactcttgaaaagattctaaacacgttctgcgggtgtcccctcagcaagcgcaatcccgtgccgaatcaacatgagataatcacaccgttctgcttcgtccatgacatgcgttgtcacgagcatcgacttaccggtatccttgagcttatttagttcggtccaaatttgttgccgtaattctggatcaatcccaacggtcggttcatctaaaatcaataattggggatcctgaatcagggcaattgccaacgacaagcgccgtttcatcccacccgaatagccactgacccgcttgtctaattgggacgttaaatcaactaatccggctgcataatcaatcatttgtgctaactttatttttggaacgctcatcaattgcccaaacaaggtcaggttttcacgggccgttagtgtctcatacaaagcgtcactttgggccatataccctacttgtgccattaccgccctattgggcatcaccgtatccatgactttaacagtgccactatccacagcttccatccctaaaatactcttgatcaaggtggtcttcccagctcctgatggcccaatcaagccataaatcattccagccggcagtgtcaaatcaatctgattgagcacttgctgatgaccaaagtgcttgctgacctgcttggcgatgacataatccgttgccattttaataaccctctttctcaaaacgagtgtatactcactcacttaatggccttagtataatcagtacatctcggtttgtcaacattaaaatgagttatcactcacttattttgtttccggcctatttgtcaccgcattgcaaacaaaaatgcgccaccccgttgttgggatgtcgcattttaattaaatagcagcactgatataagcgttagcaatgttgaaagatcgtaaatcaaactcacggtatgcaaaagagtttaacgtggctttaccggtagaattaagtgaatccgaacagaaagaattactgacaaaatatgtgcaagaaaattttgttgatgagggcatggtagccgacgtggcaattcatcgcgaccacccagataatccgcacgctcatgtgatgttaaccaatcgcccatttaaccccgatggtacttggggacagaaaacaaaaaccgaatacattttagatagtcatggtaataaaactaagacccctgcagggaatgtaagaaaccgaaaaatttggttggttgattgggataaaaaagaaaaaataactgaatggcggcacaattgggcgttgagtgttaatcaagttttagagcaaaaaaatattcccgatcggatcagcgaaaaatcctttgaaaatcaaggaatagatgaagttccaactcaacatgagggaatcaatagtaagcggcatgaaagaaaagaatttaatcaacaagttaaggactatcgcaaggccaaagccagttataaaaataaccaagaaaaagcaatcaatagaggtcatttagatagcctaagtaaacacttctcgtttaatgaaaaacgggtagttaaagagctaagccatgaactgaaaacttatatcagtttggagaacttagatgataagcggcgcatgctatttaattggaaaaacagtaacagattagacactcaaattagacgtttttaacagattcaagaatcgcttaccgtgcccgatagaatctcagttttttcctatactcttagtataacgtttattgtccatttagggtacactctaatcgaataaaagggctcaaaaaattcggattaaatttgcaatctaccacttgacggtttcccgctggaggtcgccgctaatcgtgtatgcggccatgaaagtctatgtaccggcccatcaatctatgccgactgagcagcgggtgcgtattacggtgcaacttttcgtgtgcgtattttaaaataaccagtatgttgttgatctccatgcgtagcgaaagcttagagttggtatttatttttgtttcattgatgcaatctgttcatttgcttgaatataatgcgttactttattacggcaagtcaacaacaggcggggagatttaattgcgactgcaaattatgtaatcatgttgtaatttgaaatgggaacagtgatttgctcaagaatggagcggcgaacccctaattttatgcaatatttgcgaaagaaagattgtgaaagcgattcaaaatccgttttgctaaacttggtgtttcatttccgcaacttttgcgggttgcacaaaatcccccgaaaacggcaaaatgttatttccgcttttagttattgtaaagatcgcgcgttttataatcaagttagccaaatacttttagctaattgataaaataaaaaacaccaagacaaatctctgttatcattgatgttcctacacaaacaatgaaagaggttattgtcttgatgcaagaacagaataccacagtcagaaaaaaaggtcagcacctaacttcgtttgaacgaggcagaattgctacgctgcacagccaaggctattccaatcgtgcaattgccagagcgcttaatgtttgtcatcaaacaatcaataatgaattgtgccgcggcgagatcgaccaagtaaaaaaagtgaatggtcaacgccaatattacgctgtatactcaccagaaacagcacaagctaagtacgaagctaatcgagcccactgtcatcgacctttgaaactcgtcggtgtcgctgattttatcgactattttacgactcatttgcgtcaagatggttggtcgcctgatgcagcagtaggacgggccaaacttgaaggcttatatcaacctgaggagatggtctcgaccaagacgctataccactatattgatgcccagttacttgaagtccgcaatcttgatctactcgaaaaaacgcgccaccgtgccaaacatcatcactcgatcaagccgttgcaatcctacgaaagttcttcaactgattgaagaagttctcaatcaaatggcgctcacaataaacgtggtaatcacaggtccacttgtctttggtattttcctttggcggaatggtatagacgcctgctttatcttcaatatactggcgaagtttcgcggtgccataggctttatccgcgataatatttgattgagaaatatcgaagccttccagcaactcactggcaacttggctatcatgtacttgaccacctgttaggcgaaaacccaagggattccctaatccgtcaacgagtgcgtgaatcttggtcgttcggccacctcgacttaatccaatagcttgattttcgaccatacattcggcattttttttgccccagtggccttttgatgcgctcgaacgatcgttgaatctaagctcaagttttccatgtcgggatcgtcaatcaattcgagaaaaacctgttcgaacaagcctgaacttacccaggctcggaagcgactatacaccgttttccaagagccatagcgttcaggtagatcacgccaaggagccccgttttcaacttcattccacaactgctctcgatcactggcccattctggtgcattttttggcgtcaaaataaagctttctggcataaccgatcgggcataaaaatagtggcgaccttccttatcatcaaatagcttttcaccacttcgataagcggcactggcaaccgcactacgcatttttcctgcgcttatattttgaaaactcatatgaaaaattgccatgctgttgtctcctttcttttagggtttatgggtttgattttgttgtcgccaacggcgacttctaatacaagttttaatgggtttagcacaacgtcatcaaagatgacgtgtaagtgcgcattgacctcgtttcactcggactgctgattctcctaaatttacttctagtgtatgccttccgcttcgctatttcaacttttatcctttgacttaacgtttcctatatgatatagtttcggtgattatttctaatatgattggagggatcgttatgtctcaaagtaacttagaaaaacaagaagctaaattaaaagcccttaatcaaaagattaaagatcttaattgatcaacgatacggcggtagataaatcgtttttgtgggttaggtgcgtctgcggcgtaagcgggccgtgtccctcgatatttcccattggctttggcgatttcaattccttggcgctggcgctcacgaattttcttccgttctgtttgggccatataagctagcagtttggttaacaggtcaaacataaatttatccatatctgaatcgccagtgcgcatagaaagaaatggcgcatctaagacttccatcttaacttgtttgtccctgatctgcttgatgatatcactggcatcatcatagttacgactcaaacgatccaaggacgcaatgaccagcgtatcgccctgtcgaacatacgcaatggccgcctgcaattctggtcgattctcagttgattttcccgattgcttttcttcgaatattttttcacactcagcttttttaagtgctttgatttgacgcgctaaattctgatcagttgaactaactcgggcatacccaattttcatcacgacttctcctctcggaatttgaccctacattatcgggtcaagaatcttgtgtaaatgaaatgccttcgtacatataatatgtatctaacttaaataaatgatgcttccaaggtgtcctggagtcctttgaaccctcggtggatccgcttcagagacttctcgttataaacattaaactgagaaaccaggaagcgatccagtgaatcttccgttggaaattgttctttgtgatgggtggtgcgcttgagatgcttattaaagttctcaatcaggttagtggcgtatagtgattgccggatagctggtggaaagtccatgaaagtgagtaaattcggcattttaagcagatctttgattaatttgggataggtctgatgccagttgttggcgaactcattcagtttcagttcggctgcttcacggttggcggcccgatgaacttgtttaaagtcactgatcacggccttgcggtcttttacgcgaactttgttcatcagattccgcccaacatgaaccaggcaacgttgtcgtttggctttagggaaatgccgattcaaccgaggttatattcccgcggacggccaaactggtaatcatattttagttttaaactctcaacaagctggttgatgtaacgagcagaatgatgctcttctggttggtaatccaaggcaatactcaaagtggtttgattcatgttataataatcttgcatattaggaatgtcctttcgaggataatttcatagagtatcgggtgcgaccgatgctctttttttattttctattatatcaaaagcaggtctggaaaaatccgaagatttttccagacctgctttgtttctagagacttatgtcacagcctcgttttcttatgattcccaaaattcaattttgaagtttttgttagattagagtgtaccctaaatggacaataaacgttatactaagaatataggaaaaaactgagattctatcgggcacggtaagcgattcttgaatctgttaaaaatgtctaatttgagtgtctaatctgttggggcagaaacaagaaaaattggtagcgtcaagaatcttgtgtaaatggtaaattgtaaaatagcgctaccaatcccgattaactaaccggaaaatcaataacgacaatgattaagcggggaaactaatgatgaaaattagccgctttatccgataaaagtgatcacttttggtcgatttatgaaaagtcaacgaggattattgataattttaagcacttaactagtgaattttgacgggttaatttgtcgggaagtctgattacagtgacacttaactagtcattttattgcttggagacgtggcactgactaattatttttcggtaaagtagataattgatagaagttgcgcatcgtgtagtcacttgtggtcggttaacgaaggcgtcgattaattaagtattattatagtaggtttatgccaaaagtagcccatgacgattgctactaaaacgttactaggttagtataatggtatgtgagacaactagcaggtctggatcgtgtccgtcttaaagtggttgctagaataagcatatcgcatatctaaataacgggttgtcagcatgctctaaggcccattataaagtcacttagcgactgagtaactttgtaatgggtattggtggggggacacacgtgcttcagcacggatttaatagtagaaaaaaagattgcgaatcagaaatgatccgcaatctttgcatttatttattaatttaaagtggctttttagtaccagccattagcaagccagtgactcttggcgttgctccatgaaccataacgtgaagcaacataactgttagcaacacgttcttggttggcagcggagtagtcaccgtttaagtatgaagcacttaattggtacttaccgaagtattgaccgttacgagcagaatatgaaccaccagattctttactagcaatccaagccaccttaattaaacatgcggttggtgaagatgttactaaacaattattgacaattaaccaacaagaaagctcactcaaaaaagcagatgaactcttaaataaagtggttgatcgcacggctaaaaaactttatccagagcttaattttgaacagaccacgcaagctgaaagacgagaattaattaaggaaaccgatagcgaacaaacagttttcaagggtagtgaattaaacgaacgtttaatgaacattcgtgatgatttgttgacccaacaattattgacctttaccaaacggccatacgttggctggcagttattaatacaacaagaaaaggaagtcaaaatcgagcttaaatatacgctgatgattcatgatgataacttagaaagtctagaacacgtcgatcaagggttactagagaaatattcaccaactaccttaattaaacatgcggttggtgaagatgtgactaaacaattattgacaattaaccaacaagaaagctcactcaaaaaagcagatgaactcttaaataaagtggttgatcgcacgactaaaaaactttatccagagcttaattttgaacagaccacgcaagctgaaagacgagaattaattaaggaaaccaatagcgaacaaacagttttcaagggtagtgaattaaacgaacgtttaatgaacattcgtgatgatttgttgacacaacaattattgacctttaccaaacggccatacgttggctggaagttattaatgcaacaggaaaaggaagtcaaaatcgaactgaaatatacgctgatgattcatgacgataacttagaaagtctagaacacgtcgatcaagggttactagagaaatattcaccaattcgcgttcaaactgcgcaaaggcgctaaatattgtaaagactaattggccagtcggcgtattatcaattaagcccatgttcaaaatattaactttgacattttctttaaacaactcttggataatggctaatgcctcgcgcgtgttccgtgcaaaccgatccaacttagtgacaatcaaagtatcgcctgtttttagaacgcgcaacaatttttgaaactccggtcgttcagtagttgtgccggtaaacttttcttgaaagattttttctgcccctgccaattttagtaactcaatttgatttgctaatttttgatcagtggtactgacccgcgcatagccatatttcatctttttatctccttacttatgtcattaagtaatgacacggttctaaccctttaattatacagggaaacctacacattcttcgaaactttgtttagttttgagaggtctaactctcaatttaataagcgttttttgggcctatagctcagctggtttagagcgcacgcctgataagcgtgaggtcgatggttcaagtccatttaggcccattggaaccgaaccagttggttccataagttgaatacctcatggggaattagctcagctgggagagcacctgctttgcaagcagggggtcagcggttcgatcccgctattctccattgacgacgttggtcgtcattgaaacttgttctttgaaaactagataatatcaaatatattttttcataatgaaaccgagaacaccgcgttttttgagttttttattgaagtttaattatcgctaaactcattaatcgcatttaccgtgactagtaattttaaaagcctcgaccgtctgttctgatacccgacgaattaaaactggccgagacttgccaccgttagtttctacaaaactaacgtataggctgactaagtcattagtcctcatctggatcgttgagccaatcagcgacctctttagcgtctttgaactcggtgactggtgtcccttcggtcgcctttaaaaagcgtaaattagctctttcttcttcgcttaaagacacattaaaaggtaaagcaccattagcaacaatccgcttgtaaaacatgttaatggccgtggttggatttaagcccaattcgcttaaaactgcttcggtatcatcggccaaatctttatcaatcttgacttggacccgtttcttttccttaactgccatgattgtctcatccctaatcaatatgaaaaattagttaaacaacaagcacgtttaaatcaaaaaattgaacgagaagattttaaattacggcaatttaaatactatgaaaaccgccaagcacgcaaggcccgctctcgtcgactaattcaaaaaggagccttaatcgaaaaatactttcaggctgataacttatcagtcgaacaaaccgaagaacttttaaaaatatttgctgactatgttaacgcccataaaccggataaattaaaaaacgatcaacctaataactaggccgatcgtttttattttcaggattgttttttggcttaatttctggattgtatttagcaaagtcttttaactgtttttgaattctttgtgtaagctctgctttacggatcgactttgcattcgccaaaaaagagttgtttagtgccatcatgctttaaaacccgttgtaagtgatgattttctaactgatctaagctaagctgtcccgacaaataagctaaccctaattgatgttcttgggtactgaaaacctgtggtggatttgattgccattgttccattgtttcgacttttaatggctttaaagttggatcatagtacatcacggctgtataagcctgttcctgtttagtcaatggcaatccatctaaatcgcctttgggaaaggcccttttcaatacttcatggtattgcgtttgaataacttgcttaacagccatgattgttcgcaaatctttgactgcgcgagtaatcttttgctgttcggaattggcagagtttttgggttacgaacgctactcatacgctgggattaacactggtaataaccgcaacggcagttatgagcgctcgtttgatacgaagtacggccaacttaacttaaccattcctcgagatcgcaatggccggtttgaaaatcataccttgccagcctacggtcggcacagtgataatttagaaacaacggtcattcagttgtataccaagggaattaccactgctgaaattgccgaactcattgagaaaatgtacggtgctcactactccaaagccacggtttccaacatgactaaagccgtcaatgaacaggttcaagctttccagcaacgtcgaatatggatgggcataataaaggtcagcgacaccggtaaatacagcgccaacttccgagaactcagcgccattatcggcagtaactgacttcatgattgatccgtattcttgacagatcttggccagctcatagttgactgaatcggcattacgaccatcgatcaaacgtagaatttggcagcgggattgacgctcgatcagcgttaagatcacactctcttgaccgttgcgcttgcccaccacggtgtccaattcgaaatggccgaactcttggcgctggtcgatacttttaggccgttcatcaatactccgtccggccagacgcttgtggttagctgtgataagctatcggttgtcaaagtggccagttcatcagaaattctaaagcgacaaatcgtccggtaggacggaatttggtcggcaattaaccacccagctggcttgttttcacgggcaaactgttcaattttacgactgctgaaaatgccatagctgtacgctaaaaggaccagttttaacatggtaccgaggttatattcccgcggacggccaaactggtaatcatattttagttttaaactctcaacaagctggttgatgtaacgagcagggcctagttattaggttgatcgttttttaatttatccggtttatgggtgttaacatagtcagcaaatgtttttaaaagttcttcggtttgttcgaccgataggttattagcttgaaagtacttttctaataaagcccctttttgaattagtcggcgagaacgggctttgcgggcttgccgattttcatagtatttagattgccgtaatttaaaatcttcccgctcaattttttgttttaaacgcgcttgctgctcgactagtttttcatattgattagagttcctctgagcgtgggactaacgaagcgcataatcgaatgatccgccgcgatgtacccaagggtctatccatggatattttgggtcctcatgatatccaagcagttgagtcaaagctaaacaatttaccacgccggcaaactggctatcaaacacccaaagagcttttctccgctgcttccgccggttaagttaagtccataaaatatgaatattaatgaaaatactgatttaataggatttatcgtgtggctaatttgttcttgcaatttgggaattcgctagcaaataaattttagtacaacattaaatgagctttttagaactcatcattaatttgagagtttgatcctggctcaggacgaacgctggcggcgtgcctaatacatgcaagtcgaacgaactctggtattgattggtgcttgcatcatgatttacatttgagtgagtggcgaactggtgagtaacacgtgggaaacctgcccagaagcgggggataacacctggaaacagatgctaataccgcataacaacttggaccgcatgctttattaaacagttgtgagagaaatttatttagggattttaggcactatttatacctgttgtgctattgaggttagttgtgataaggattaatttgtactacaaaaggcctactcaattgttagttgagcaggcctttggtgggtattttgattagagctattaaccctatgctaattataaggcttagctttcaaatggaacatactattatccaaattatgatttgttaaggtggtgttgtcatagttactgaattgaatcaattaaactgaataatgagaaaagacctgctcgaaagtggcgagttttacgggattcggtttcaaaatttttcaacattattaattattccagtgacgctattgttaatgggtacgattctgttttcactcgtagctaagcgcgagattgttattaatggtaccggaactgttcaaccgaccggaacggttccggtgattcaagcgactgttaatagtgccatcaaaaagaattatttagttgaaggtgcgcgagtgaagaagggccaaaatcttttgacccttcttcactcgcgcaccttcaactaaataattctttttgatggcactattgacagtcgcttgaatcaccggaaccgttccggtcggttgaacagttccagtaccattaataacaatctcgcgcttagctacgagtgaaaacagaatcgtacccattaacaatagcgtcactggaataattagtaatgttgaaaaattttgaaaccgaatcccgtaaaactcgccactttcgagcaggtcttttctcattattcagttcgtccttaattttttgattgagggcttttaatttagcttcttgtttttctaagttactttgagacataacgatccctccaatcatattagaaataatcaccgaaactatatcatataagaaacgttaagtcaaagtataaaatttgaaatagcgaagcggaaggcatacactaaattaaagttaagagaatcagaagaccgagtgaaacgaggtcaatgcgcacttacacgtcatctttaatgacgttgtgctaaacccattaaaacctttctttgtgcttccttttacttgatcgctgttgaattatcttttgacccttacctcttctttttgattttaggtcaagcgtaaaatctgaaattttattttgatctagcttacttaaatgaccgatttctttaaagtttaaaccggctttgggaaagcgataaatattaccaagatcgacccaggaaggtttcttcaacccagcggattgccaatcttgaatcggataatattgttgcttgatataagccgacttcttttcatacactggcttcacaatatgcggccatcttcttagatgccacttacttgccgttaaagcgggataccgttcaaaaagaagccgttcatattgcgattggcattcgtccagatggtacgaaagaagtgctgaactaccaagtggcgccaacggaatcgactggaatctggactgaactgctgggaaccttgatcaagcagggcgttaaagatgtgctgttgtttgtggccgatgggttagttggtttggatgaaggctttttgagagcgtaaaatatcttgtgtaaacgcataaaagatttctaaattgtatagaaatagggaatgccttcccttatgatatttagtaaccacagaaaacatcacaggaggcattccccatgaatgaacttaccacagaaattatcgctgcactagcccaaaaacaagatttggacgaagtttttcgtcaccaccttgaaatcgccatcaaccagctgcttcaaacttgtattagaagtcgccgatggcgacaacaaagtcaaacccataaacccaaagaaaggtggtgaccgacatggcaatttttcacatgagttttagtaatattagtgctggtaaaggacgaagtgcgattgccagtgccgcttatcgaagtggtgaaaagctatttgatgataaggaaggtcgccactatttttatgcccgctcggttatgccagaaagctttattttgcttcttagcgccgagagtagttgggggatcgctccctgcgagggtaggacgttgccatgcgaaattggaggattagctcagttgggagagcgtctgccttacaagcagagggtcacaggttcgagccctgtatcctccatcatgagccgttagctcagttggtagagcatctgacttttaatcagagggtcgacagttcgagactgtcacggctcattccttgtattatcatcaactgctgcattagctttattcgctatctcaacaacggttgccaacgctgatacttatactgttaaggccggcgatactgtttcagcaattgcccaagctcacaacacttcagtttcagccattgaaaaggcaaacaagttagctaatgttaacttaatcttcattggtgataagcttgaagtcaatggtactactactagggactgtctgaaaactaaaaattcaggtataatctgaggaaaaacgaatcgaggcattccgatgacaacacctaaacgatacgaactggaagatgctcagtgggaccgaatcaaaggatacttcccgccataccggactggccgtccatcaagcctagacaaccgtaccgccctcaacgctatcctctggctcatgcgcagtactaacctctttatactcaagttagatttaaatggcttaaatagaagaataggggcttttaaatgagcgccagagctaacaggctaaccagctcaaaagttcagcctttagatcaacgtcaagctcaagtgatttgaggccaggtctttatctattgataaggtactcaaaaggcagtataatggtagtagtaaaagacgacttcaacacagacgactcaacaaacgaccacgacacaatcatcagctcagactagtcaaactcaagctcaaccgagccaagctagccagacccaatcaagtcaaacacaaactagcaaacctgctgctcagacgactcaaacgtctagttcaacatcaaactatagcaacaatggttctgatagtgctgctaagccatgttaaaactggtccttttagcgtacagctatggcattttcagcagtcgtaaaattgaacggtttgcccgtgaaaacaagccagctgggtggttaattgccgaccaaattccgtcctaccggacgatttgtcgctttagaatttctgatgaactggccactttgacaactgatagcttatcacaactaactttttacattttgattacaagtgcatacccccatcttcatgccggttccgggtttggtgttgccgttgctttttcgtcatttcccactcagtctcctttaaaccttgcgcctgtttttgccgttcgtaatcttcatcacgggcatataaggcggtcatgattgcgttactaaaggccgtctttaagtaatagtcgcgaccgaaaacgtattctgatgaacagatcagatttgcttatgagttgcgaaaacaaggcatgacttataagatgattgaacgaaagacggggattagtaaacgcacgcaacagcgaaggtttaagtcgatttaaaaataggtgttttaagaattgaatgtttaattaatcacgtacaacggggattgccgggaaacctacacacgcgtcgaaactttgtttagttttgagagatttaactctcaaaacttgttctttgaaaactagataatatcaaatatattttttcataatgaaaccgagaacaccgcgttttttgagttttttattgaagtttaattatcgctaaactcattaatcgcatttaccagaaaaaaataagattgaacaacggctaggtaaacaaatcatcagtcaagccaatttagattatgctaatttgtctaacgatcagattaagcttttagccaagcaattttctgaatttttaaaggtaaagtccgtagatcattagccatacgagatggggaaattccatgtaagttgtgacctggcttgttctatctaagcactttactcattatatattcaagacgtcaaaaaagttgcatctaatatatctaagccctttaacggggagacactttgatacttgcaatgctcgattaattacttaggtatacaaaatgattattgtcacgagaaaaaaagaacgccgtagcgttcttagtcatcatttttatgtattaaaattaaacgttcaaacactagatttttaagcaatcgctccagttaacgtggctacttggtatttaaaccccaacttggctcttagggcggtcaaattcatcaaactgcagttgtggactagtcgtcaaactgtcgggggttcgggactgtacttagtcaggaaattagttggattttctccgttaaggttggtgaattgttaaataaaaacatgtggtattttggttgggagagtgggtcgtcgattgggggactccgacaggcgggctcgaaccgtcgacatcttgattaacagtcaagcgctctaccaactgagctatgtcggaataatcgcatggcaacgtcctaccctcgcagggagcgatcccccaactactctcggcgctaagaagcatgatgctcttctggttggtaatccaaggcgatactcaaagtggtttgattcatgttataataatcttgcatattaggaatgtcctttcgaggataatttcgtagagtatcgggtgcgaccgatgctctttttttggactaactggcttgtaatttagcggttgataatgtccaatatttacttttctatactggtcgtccttggcttgttgcccttttaactgcttttggattttctcgatctgactgttcttaatcgtcggtttgaagcagctggttaatcgcaatttcgaggtggtgacgaaaaacttcgtccaaatcttgcttttgggctagtgcagcgataatttctgtggtaagttcattcatggggaatgcctcctgatatggatgggcataataaaggtcagcgacaccggtaagtacagcgccaacttccgagaactcagcgccattatcggcagtaactgacttcatgattgatccgtattcttgcccaggccgatcgtttttattttcagaattgttttttggcttaatttctggattgtttttagcaaagtcttttaactgtttttgaattctttgtgtaagctctgctttattatactagacaaaagatcagctcctaaaagatgggtttgtggtaaacaccattttaaaggaagctgatcttttttgtccgaacagcgttcggattaattttacaatctactaaccgcaaggttaaatggatattattcaatttaatatttagtttcacatagtgtggtgatgatggcgagaaggatacacctgttcccatgtcgaacacagaagttaaatgatgttttctgtggttactaaatatcataagggaaggcattccctatttctatacaattcagaaatcttttatgcatttacacaagatattttacgctctc

SEQ ID NO: 16 - skipped
